United States Patent Application Publication US 2007/0016976 A1 - sequence listing, part 4

SEQ ID NO: 6435 - DNA, 2000 bp, Oryza sativa
gcctaattaatctatcattagcacaggtgagttattgtagcacttatagttaattatagactaattaggctaaaaaaattgtattacgattaactgtgcaattagtttatatttatatatmatgtgtcrtgtatctgtctmaagattcgtgtgrtgtttttggggaaaatattttggtwactaaacaagtcccyagttccacagacaatccccagtgtggaagtggccggcgtgcgatcgatcgagctgcggtcggcgtacgcgacgaccctgatggatatgattcatcaggttaggcgccaatacaggctcagggcagcgagcaatgtccctggctggcaccggcaggttggttgggatacaataccagcagtagtagcacctaattatactctaaaataatcttggtctcgcaataattagggagaatgatcgggcagggcttaatgctaattatctgtgctgatggcggcagcgattgcgtcgcgcgctggtaattagcagggatactagctattgagtgttcttgtgacaggtgacagctccacgcctggcggcaggtggcaacatccaggcaagctccacagaattatctctcttccgaaatataaaaaaaatttgaggttagaaaaagtagtgtgaacaacagacaaaattaaaagaaaaaaatagttgagaaaattaattaagaaggaccaaagcttaaaaaagaatatgattagttgagaaaattaattaggtgaagaaattaaaagataagttgctttaactggttgaaaatagaatactgatgaagaaactattatattttaggagatagatagaatattttcaggaacaagaaaactaaaataatttattattatattttataacggagtaagtagtgatttttttaattttttttatcaaagggacttcagtgggagtagcaattacttagtaggaggtaggaatagcaattagcatcagcaagaagacctcttcttcttcctcctcctcttcctcattcccagccggctgctatctctcacctacatcttcttgatagtagtattattttgttccaactttttatttaggttttgtggcgtgctggtagctccttcttccctcgtaccattttcgctgttggtctttattgcagcagctgctgctgttgctcgtgctgagctgagctgaacctgccaatctgcaacactgcaatcgttagcaagttcgctcaactggccagctgctacagatatatctgctgataattgagccccaaccacctttctcttccccctttaaacttccctggtctccgtcctcttcgatctcctctgccgtcgatctcatcggaagagagcgccaagcaagaaaggtaaccatagtgttcaacgttttgtttttctttggtacttttctgctgctttctcgaagcatttcttgcctcttgttgtttttatcccctcgtgttcttgatttcctagttcttgggctttctcgcacactagttttagcctagagtttctccacctgatttctgatgatgcgtctggagtcctgacctgtgatgtggtgatgctctgggagtttgtgttcatcagatgacgatctgtcaagagtttttcttgagtggcaaagcatcattcggacagagattctgaaaataagtgatgccgtcgaatcatccgctgggatgcgaacaaaagaattcttggaattgtggtctgaataaacaagttggatgatccgttacttatgaggtgtttgaattgattggggaaaagaagtggatgataatggtttaagacatgctgatactcccatgaaaatatgcatatgtacaagcatacagattgaggcgagtggaccatggtgttagaagaaatcaccaaacttcagcttgctttggtgattgttcttggcagctatgccatctggccgtttgctttgcaaatcatgtgaactgttcagtggatgaggtgctaacctagtatttacatgtgccatac

SEQ ID NO: 6436 - DNA, 64 bp, Oryza sativa
ccacccctgacactggtcggcgatcgttgcttcccccctcccgcggtgatcgcgcgcgacaccc

SEQ ID NO: 6437 - DNA, 2000 bp, Oryza sativa
gacgtgtcaagcttgggcacagtggagactggagagaaaacaatggagagagaaaatgtaagggggcaccacatgtgtaccagtcatctccggctatttkgttttcttccattttgctttggcattttgctaggcagatactacaggtcacccattctaaaaggtccagtaatgggcatggcaagattttgttagatcttctatcttcctacgtacagtatatttgtgtagcaataaaaaatatattattattttgcttaattatttaaaggagccacaggaatgtcatcaccgttgatcggcatgaacttcattgatcacaaaatagctttaattttacaagcagagaagcgcataagggatgaggaagaacagcttaattcaaaagagtacatcgaaatgtactatttttgtgttgcgatttaattgtgaacaatgcaaatttattttctagaaaaaccattgcttccataagcgagcaaagtaaagtatagaacagatagacgcaccccagatattagttggtagaatatattatgtttgcttggggatctcgactttcagcaacaaactttacaagaagtttggccacgtagcacaatattaagtaaaaaacaataggcaacatgagtataaagctaccctaaataagtggaagtctaaacttatacatttgtatataagttgtacatattttaataagatcaacatctggcctaaccaatctatcagatattttatcctatccagttaccaccctttttgaatcatgaattcccaatcaaatctaaacacccttgtcaaagcatcacatataaggtaggagtaatactaattcaaacaccgagatatttacaatttaaaatattttttcacctcaaattaagcctctcattgtttgccccatggctcataagtcgtgaaagaatgaacgaagtaaaaaaaattataatgtataaataaaattttatatatgtgttcttaataatttcaaaatcaatattgaaaagaaactatattaaaaaaaaatcttagtatcatctttaaatttaagtttcaaaagcttaaagtttggttgtggctgataaaccaataagcatacaacataggcgtttaaggcgacatttgtttcggatagaaagtgtatttacacatacacatttcttgaactgctagacaaatatatttttttacaaaattttctataaaaaagtaaaaaatatattaatactcaattaatcatggagtaaaaatatattaatactcaattaatcatggagtaacaactcacctagtaaaacaagtattattgattattttatccttcaactctcctctctagagacagaaaagatatgtatctatagtacagtggcaagagatgtatagtttcaacttcaggtccagtctccaatcctcaataggttcattatttctttcttaaaaaaagttctctccctccaaatctcgaaacaaaatcagcgcaagggatggcgaaaataaatgtggcgccgagtgggagcgcaacaagtgtaccgaagtggcgtgaaggtagcagcaaacacccccgttcgcggagcaacaaatgaatattaacgccacgcggaccccctccagcagcagcagcagcagacggggagacctgtccgatacggcgcgtcccgctcacccccacccgtccaatcccgtctcaccacctcccctcgccttctccctccttcctctcctcctcctcctcccctttcccctccccctcgacacgcgcgcgtctttgggcaagcacacacctcctcttcttcctctctgctcctctctttggttctcttcacccaccccaccttgtgcttgcgaggtcaggtggtcggcttcgttggcttcttgggaagtagttttgttgttgttgttggaggaggaggaggaggaggaggaggaggagaagttgctggtgttgttgggggtgattttctttgtggggggaggagggagaggtgatcttggtg

SEQ ID NO: 6438 - DNA, 2000 bp, Oryza sativa
gatgaaagaacaagcaaacgaaaaaaagaatcccaaacagtataagcgcaacaagaaggaacaactcatgcatgttctaagtggatatctcccttttatttcttgcaaatcttttgatttagcctgattctgcatgatagtatgatgctatttcttcaagttatataaaccctcttgtgaaatgaaggcgatgcccttgaataggtttgtgagctttctcatcattggataaatgggctgaccctggtttactgaaaacatagtttgcatgtcgtatacggtatattgttattagttacatgtgggaatgtctttgctcttcaccagggaaaaagaattagctgccatcaagatcaaccctgctgatgttgaaattatcgctaacgagcttgaggtgaccaccttaaatcctcatcagatgattgttttataatgttttcaaatcctgttctaatatatatttgaacacacagttggacaagaagattgcagagagaacactacgggagcacaaaggcgatgctgtagctgcagtccggttcttgcttcgctgattcttacacattttgcaagatctatacaccatatgaagcagctgtagtttgctattgcttgctgctgagaggaatttctgtatccacaatgaaacgatcatatttggcatctatgtagaactttttttccatgatgttgcaaactggtctctgttgtcttcttgtaaaacttggttcactcaggagtttattgccgtttatccaaggtctttctataccttctcaagatgttctgattttttttggatatcctaagctctggttctgaatgactggaatgaccatagagcaaaagaatagctgatagattatccaagatgaagagaagatgacatttaattgtttcgtacttgtatgcttttattacaacaaaggtgaagtgccttcaaaggtaagaaacattcatctgtaccacatgccaaattgtatccatttgattgccctgcatcattggcacctgcctgtttgctaccacattgttgtgtactgacagcttcttgagtttggggctgcaactttgcaattcaatttctggaagactgtctgaaacgaagcattgagatatccaattctctatactctttgtattgcctagttgtcttctgtggaaatttgtgagttaactcatactcccttcgtttcgaaatgtttgacgccgttgactttttaatacatgtttgaccattcgtcttattcaaaaaatttaagtaattattaattatttttctatcatttgattcattgttaaatatatttttatgtaggcatataattttacatatttcacaaaagtttttgaataaaacgaacggtcaaacatgtgctaaaaagtcaacggtgtcaaatatttcgaaatggagggagtatataagtttagagagctgtttaacgctcatctcggagagatcacctgatcaacaaatacttacgttgctctgacagttcaattttatcaagatgaccttaactcgaatttctgattaagattctttcctgacatgcgggcccaactcatggaccccttggcccttgtgcagcgagaccttcaccggccgtacgtggagggggataactccacgggagcatccacgtggcacgaggcttctgcctcccctgaccaaaaacacgtcgctttatacacgcgtcgccctcctattggccacgctcccgtatcccagtgcactattggacagcggccgtgggccatgccatcccacgtgtacacgcgcggctcgtcactccccgtgggccaggtttgtcagtgaaacatcctcccgtgcgggtaaccacaccgctccgccctttattaagcgcggtgcatttcgcgctcgctacccatctcattttctcaggtggttttctggttcagtggagaaaaaaaaaggttagaattagacttctttggaaggttctagaggtttctagataccgccgtcccggggggtg

SEQ ID NO: 6439 - DNA, 2000 bp, Oryza sativa
tcgatcgatatctcctgcctccgctacttgccaagttgcactaacatgcgttctcatttttattttgggtactgctaccttcgttccatattttttttaagtcgaatttatttagctttatcaatttttttaaaaaaacataacaaaattttcaacataaatcaaaataattataataatatattcaatgttatatttaataaaactaattcggtgctacgaatatatattactatatttttttcataaatttagtcgagcttttttaaaaatttaagtttagaaaagtcaatccagtgggagtaacttctaatacacggagggagtacaaatcattctaggaccatgatacagcccgcacatatgcatcttggtcggcaacgtgtgacaagaggtactatgccatgcatgtatcaacattgattcatatacaagtgattacccaattaaaatctaaattcatgtctaaatatttgtgtataagggttaggctcagcttgaaacgtattatagagctttttagaaattatttacttgattatgaggatatcaaatgctttaataaacaaatttaacaaatagttttaaacaaatgatataaggaatgaagcataagattttttttttagaaaatgcatttttccaagcgtgaaataaacaatccatttcaacattttgataaacaaaatctgaatagaaacacgcggatgttgagttgtacttactttataattttaattttaataaaaatggattacagcttggatcaagttttgttatcagagcttttttttgaattatctttttaccttggaccaattaactttatatttatttttcaatttaagatcattatctatcagaatttaaatcgtagtgacaaggtttcaatataatttgagtaaatttcataaaactacaggtattttgaccaaattttcacaaaactacagatttaaggagttgtatcacaaaactacatatttagcactaaatttatcacaaaactacagattttagattaagtatcataaaaatgcatatttaatattgagcttatcacaaaaataccacttttggagtttaaatccctagcaccattgttatggtggagctataaacatcattactttgtgattaaattgattctaaacatgtagttttgtgataatttagttactaatatgtagttttgtggcacttcatcttaaatgtgtagttttgtgataaatttggtgttaaatgtgtagttttgtgatacaccgagttaaatctgtagttttatgataatttggtcatagtatctgtagttttgtgaaatttactcatataattttaatgggacacgctgatcccgttcgtcaccataagcttgtctcatagacgtatccacgcgtatacgggtgttcgcggatcatctccatctcawawacyccatctgtcaaaaaaaaaaaaaaggccaacctagtagattcaaacmccactatagactaggatgtgccatatcttagtgctaagttggctttttttttcaaccgagggagtgcatgtcttacaagacaaatttgtgcatatgtgagcgtggtgtgatgtgtcgtgggtttaagggacaaataagaaaagaagatgccttttcataatgttctaaaaaaagagatggttttcagaagcatcgcacgcaaggggcaatgtggctattagaacagtcactctccacccttagctacagctactacaagttgagacgacgttgatgttgatctcgtcgtcacaagtgagaccgggactagtactcggaccagagaagacaaacactacgacatgatagatgcggcctcctcctcccttcgtgcgcctcgaaccctccgcgaagccgccaacccccacccctctccccctttaaatcgctcgctcgcgcgccacactcctcgaaccaccaccaccaccaccacgtgttcgatcgcgtcctccaagccccagcacctacgcgtcgtcgcgcc

SEQ ID NO: 6440 - DNA, 2000 bp, Oryza sativa
ctatataaatccaaacattaacacgacttgtgaaacggaggtaaagtgaattaaaattctctcgctaacgttactacaacttatcataatactaacgtgaacatgacctaacataaggacagtaacgagtgcaatcaaagcaacaagaggcttataggttctacatgaagaacatacaaaccaacaaatcagactaacttcatctacgaatcaaggggtaaaaagaaggacaaaatcagaacccaaacaccaacaaaaataacacagtactatgctatttcatccttacatatgctcatgtgaatggtactaattttcctccttttcaagcgcgaatggaaaaagaagctatcatgccagacagactaattacagggtgaaaagaagaggaaacaaaacaaccaaacaccaaagaaaatatctgaatgtgtgaactctctacatcatcctaaattttattacttctattttatgkttgtgtgttactgatttgacttacccttttgtagtatacatcgataaggatgatcttactaaaaaaaatacacaaaagcccaccaaagaacgccttacgtggtcaaaagaaaagaaagcgaataggcagacaccgataaaaaattctaaaggtaataaacattgtacttttgtatagatctattatagattgtatgtttccatattaataatttgtacgacctttgaagagttgactaaaaaagaagaccatttcattacctacattaataaaacaaaggataacaaagtgatggtgcatattgaaggagtgaaggttaatcggaaatcaatgaaagtactaacagaaccagaatacttgaatgacgatataagttcgcctatttaacaaacctactttccttttataactatatttgtaatgtaactgaactaacctcaaattcatatgatggatgcatacatcagttgcctccgtgataaagagaaaggaatcaggggagatgacaaggccttcctagagtaggcagggctagtcctgacttttcagagccccggtgtgaaactagatataaaggcccttatcatacgatataataataatcaatagatatatatattgaattatggtcataaatatttaaattgcattcatcaataatatttatataggaaacattgaacatttacctcgaaaatttcttctgacatttctagctgcgaagtcattgataatggtaccaatatcaatttcatccaataatttcttctcaatgcataaagttatcaaaccatttaaccttttcttttttataatgtacatgtgtgcagcacaatagtgcagtcagggccttcgtcgattcgtccaactctaggagcaacatcaattgaattaattaaataatcgattttgctatatctcactcgaaagattttttcttatctctcactcgattttctcacttaaatttacagtacattttcttttcttgtaagttataatgtaatttatgaaacttacattgtaacttttgtaagttacagtgtaatttttgaatcttcgcatgtaagttttgaaatttgtattggatttggtctttttcttaaagatatggtaatttagtgtctactatggtgtttcttagttgcttttkgccttttactgtgtctattggattttaatctaaagattaaaaatctgtctgatacgatcgtaaaaatcttttaaaagatgcataggtactcccttaaataattaacctaacattcaatcctagggaacaactgcaactgaatcaatttttcacatgtacttatggcaattgggaatttgagatttaggaaattgactcactcacctgaacacaaaacataccactccgagtcctgattcctgaatttactgatcgttctcctcggcagtactcgatggcagcaaagcaatctggaaagcggcaagctgcactgcaagaagcggcgsctscggytgcggctgcggcctgcgggcttgtgtcggcgggacggcg

SEQ ID NO: 6441 - DNA, 2000 bp, Oryza sativa
cgccgccgccattgtcatgtccatatccatctctgcgcccacgcctttgtgacgaaacccattacgcagcatctctgcctccattacggtcgtctccccgtcgaccgtgaccaacgctctccgctccctcctcaacgctggtgtcaaaccgggcggccaccccgctcccatgactctcctcatcctcctcctcccgtctcgccttcccccgcgtggctgtggcgccgccacctctatctggcacatcgcgtggctcctacccgcatgcatgccctccttgcagggctccgctgccacacccttatatcatcgtggctagggcttagagtgagatcttgtgatctttttatcttcttgtttgcatctatttagtcttgattaatttataccataattttatgtatttatagttttattcgcatcattttcgaagatatatgatttttagaaatatatattgcaagtaaaaatatattttattttgagggcatagtacgagctcgcctttatggccctctgaaatttagagccggtcctgctcacaagtgcttccttgaaaattcctcagccctgtaaaatcttgccaatgaaccatccagctcacatttgcatgataataatcgttgatgaatttggcatgtggcaacatcaaaaaagaaaaatcatagttgcatctgcatcatcagagcagaatatgttagtgagtagtgttctgttttttcacaaatagtgagtagtgtacttacgtggtgtttgggaaggagggactaaactaagtccttcccaaacaccacattaagcagaatatgggcctgtttggttggtgccacattttgccactcttgaggtaggttagtttgaccaaatgtagttagtgtttggtttgtttctataactttggcatgccacactttctactcttttgatcccactagtcatagacccttttcttagccaaagtttgctaagtgtggctatcaaattttaagccacacaatttgcatcttgccatacctttggtaaaaaactgtggtaatttgaggtgggcatccaaacagcccctatatgcacccgatggctcgaaagggaaaaaggaaaaaatcctgccgatacaaggaaaagaagaatgtcagcacttttttagataatgaaaaaaaaagagaatatcagcacttattaggcgagcaatagaattgcgcgcgtaaacagtgacgtgaatcggcctgaaagcccacggtacgtgcggccggcgttccgcgttccgtgacgacaatgagaatagacgcttctagaacatacagaacaacttcttttcgcctgctcgtgatgttccgttcacatttcacagccgtttattagagagagatcacgaaaaactccccaaaaatggcgtgggctacgactacgaggctaagataccagggtttatccttctcctcgttgtatctgcttgtaccgatatcagtcagaaaaaaaaaagaaagaaagtttgcactaaacgtgttttttcaattttcagtactcctacgtactccgtacagttggatgccgatcggacggcggagtgcagctcgttgacccagccgatttcgttcacacgtggcggcgcgcgcacgcgggacgtggcgcggggaagcccccaccaccactgggcccaacgccgcagggcaacgcgtcattcrckcgcrtcgcatcacwggcacwggcaaccwcacwcgggactcgggactggdgggaaggaagattttacacacaccggacttaccgctataaagcgcgaaggccccccatccacgatgccgtctcgcacgccccgttcatctctcgcctcsggctcctccgaaccgccgccgccctctccccgttctcgtcctccgcgccgccgcggcacagccccgcatcctccgcgctatccctgtcggtgcgcctcaccgccgcgcgtctccgcagccgtctcgccgctggtccgtccggtcgccgccgggttcgcgctgttcagc

SEQ ID NO: 6442 - DNA, 2000 bp, Oryza sativa
taatatgatagacatatcactccaaaaaataactgttcaaaattcaacttctacgagtaataaataaacaaattagacttaaactactataaagtatgttcacagttatatcggttgtaacttatagaaatcaaatttaaatcaacaattttataaattagtatatctcaagtttttcataaatatttactccaaattatctgacctatattttacacggtcttcaataacatattttgaccattaatttatttcatatcatgtcattaatatgaaagcattttaaaatacgaatacaatgatataacatacataatacttgacgtagatattgttggtgcaattattaggcaaaagttatcgagtttgatttttctaaaaataaggactcaccctataattcaggacagagggagcagttgacatatgggaatccctaagaaaaataaatactttcccgcattttcatcttctgcaaggcgagaactagatagcgaagaggcggcacgtgtaggtgtctcatcagcgtgggctgttgtgttgtgatctaaattcatttgcacataataaatgatagcttctgtcagagcgaagcggaggcccgtccccggaggcttgggccagagcaaagcgtttggtagaactgataagggacttgttggctatgttgattcatattttgctgttgatttggataagtgaagatcactcacaggtgaacggatcattatccttttagggttatccttcgtataaacttcttgtaagccaccgttcggcgttgtaaccttaccccgatatagtgaagatatttttgttggctggcgcccatgcttttttctctcctgctttgggaaggtttttcacgttaaatctcgtgtcttctgtgattgacctattgttctttattgtttatttgcctatcgtttcctaacatgggcaacacgagaccaggcggggcaagcgcatggccattgtcgggcacgacatcgcggtgtgcacatattgcggcacgggcctcgccatgccactgctggccgccaggggcgaggtcgggcattgccgccattgtccagtgcgcacagtgccaccgtatgacgcatgataactggtgtggaggctgcggcgtgggtggtaaagcacgacgtattggccgactaccggggtttacaaaaccgtgcgattatcgtggttatcacatgcggtaaccgcatggttttcgtgcttaccacgataaccgtcaaactgtggggtggtgattaccccacccaaaatggtttggtgaaccctaggttgtagtagccgcagatgaacgggtagtcggtagggttcaccaaactgttttgggtcatattaccaccactccaccgtttggtttggcagttattgcgggaactgcgtggttaccgcaaaaaccgtacggttaccacgaggtgtagcgtgtggttccaaaaactgagaaagttaccgtatgttataaccacacggttttgtaaaacatgctacgaccgttcaaggttgccgacgaggtacaccatgctggcggctcactgatgttccagtcctccggccacggcaagcagaagctggaactgagcggcgacgtggtggacggcctcgacgaggcgatctgcccggtggcgacgtcgagcagaacggcaggatcatcaaccacgagatcaacgagctagatcaccatcgtcctcccgctcaggctcggccctcgcgtgaggaatttgcatcgaaatcaagttacaatgcctaattgtccaccattaatctgcggttctccgaacccaaataatcagtggatttttggaataaaggaaggaaaacgttgcttcgcctacaagctcaggggattcgcaatgttttgctttttctcatggcagaatgatggacagtggacaacccacctgctgtagtacgcatttccatctcctgcactgcaaggcgcgacagcatccgctgctgcagctgcctagctcgtcgcgtcggca

SEQ ID NO: 6443 - DNA, 2000 bp, Oryza sativa
actatgcagaagagatcattttttgtataattcagtacagtttgtggccggctttgactgttttattcagactagattaggagactttttaaaactgttgactaacagttatgcttgcaaactggtgtcagccatgaagaacacccacagaagaagaagatttctcgactgcaaatacagaaatgagacgacaaacagtagtacgtgcaaggagattaggagaagagtgagttcgtggcccaagtgtcaggcaggatcttcgtctcttcgaggccaaatgcaaccgacaggaaaaaaaaacaataaaaaaaaaacgttgacacctcccatgactggcactggcacctccagactctagcagcgagtacaaatggcacagggtgagatggaattcccgagagtttaatagtatagccaagtactaactccaatttttctatagctaatctaatagctcatttatacaatagttacatattacgcyattaatatctggtcccacctgtcatatwcacactacgttttggartccgtactgcagctgactacaaatctatagccagctgtccttctctctcctcatttawtttcttgaaatatgtttgcagctggtttatagcatgctactttacctgctcttaggaagcgggtggcttccaacggtcagaatgggcaaaaaggttgggttggggaagatgagtgcgggcagaggctccggcacggggacgtgcgtgagatcgaggcatcgtcacgagctaccagcctttttctggtttgtattgtacagctactacgctagaaatgctccaaaagtctatgaaccgttggatgtatgggttgctgaggtgcgacgatgcataggaattgacaattttgttgccgattgacgcagggatgctgaaccgtaggtacatatgtacagcattcagtattttattttgtactacatctgtcaaagtatatagctgtcattctaaattgtttagtgtagattaaggtttaaggagaaacagatgatagtgtccttcattaaatggtgtatggttagttatgaaagggtggttaaagataaaataggaataaacgtggggtgatcgatggaacatgtggtaggtattctaaagtgacaactattttaaaacgaaatttgaatcctcgagagatagttattttgggacgatcgtagtactcttttcaattcaaatcaacttttatatatgagatcacgtataataaaatttgatccattttgagatgagggggaatacattgaaagcaacacatcgttatgcgtttataatacactcagtacgtgcaaaaaatggacgccattctccgacacaacaggtcaaatggctcatttagtttgaagccctatcaaaatattgtagtgtcaggcattaccaaatttgatactagttaggctaaagatgatataaattgaaatgccactaaagtactattttgaagctaccaaaatatagatagggtacaaatcatcaccaatctaaacatgtctaaaatgaactggcttacattttatcgaaatcttatacccatccatcgtataatatagcaaattaaagctaaatgggacgttacaacgaatctagacactcatccgtattacgcgacggacggagggagtataaaattttaggctttactcgctgatggctgagctgggccgaacggcaagagccggcccactgcccatgggcaacgcaatgcgtttgcagtgtgttgctagtgctgcccaaaacctctccaactaccagtctgagcttcagaaactgaaagtctgaaacctaccagctgctgatcaattcctgctctgcttcctcatcatctttttatccatccaatgcgcggacagctaccagtctttgcatcaactgaaaaaaagaaaagcattgctacttcacttctgctcgcatttcaattctgaattatcctgatccaaacggcagcggtaaaagcgaactaggagcgatcgatcg

SEQ ID NO: 6444 - DNA, 2000 bp, Oryza sativa
gttaaggtgatataataggataaacttcatggtataaaccattttactcgtttcaacatgatctttttacttattcaattaaaaaaaagtgaggcataaacttaacataaatctgtccactgttttgacatcaatattaaaacagttaaagatgtgttcgggaggtgaggacctcccgcgcacgtagaatggagcgacgtattatgattaattaatactttgcttttttaaaaagaatggattaatatgatttttaaagcaactttcgtatagtttttttttcagaaaatatatcgtttagcagtttgaaaagcgtgcgcgcgaaaacgaagggaggtgagttaggaaagttagggaaagaactaagctaagtcgtcattttgacgtaatagtgcaattagaaggttcatttttatatagggagaaatcacaaaactaaaaggagtaaaaatcataacttgcgttaaaaatgaagataaaaatatagaaccgctagctccttttatgtttgaacttgcacttacgtgtaggtgtggtatatgtgcgtaggggtgtgcgcacatgtagtcttccatcatgtaatcgggaaaaatagttatacatagagggatgcacgtgacattactccttccgttttccaatatccggtaattttgatttctccttttaaactttggccattagctgtctttaatttgttatgtagaagttwacaataggttgtatgattaaatttaggacatacccatttcaataacatggcatcaattttagtggttcataaatattaaaaatgaaacgagtgatccaaaagccaaatgtgtcctgtataataactaaacgaagggagctaattaatactccatgattatgaacatccatgatcaaaactcgtaggactcatttgaaacacagaattgaataaaaaagagaagtataaaaaataatacaagattttgattaagatattttgttttgcttattttgataggagtacaatcgcaaaatagagaactgcaaatatatggaaatcactgtctgattaagctgttggaaaaacataaatcagaaatcggatgcgagatagactgatagaaaaatttttaagaggttagagttattgctagtaagtttttttttttttgccaaatttcacgtgcaacgactcaatgagccattctacagggattttataggattaaaaaaatctccaatcctttatactacctccgtcccataataattgtatttatactcttcaaattttgtcctacaaaaattgtatttctgataagatgagacccacaaatggaatttgtatcccaaccttccttttaattaagtttacatatggaatgtgtgcctcaacctttcttttaacaaagtatacatatgaaatatatgcatgcaatgtagttattaaatagggttattgtggtaaattgtgtttgttgttaatatgtctctaattccctagaaatgtaattattatgggaccggagggagtatcaaaaggtcaaatagaaaaaaaaatctatagaaattaaatcctatgatttttttctcacaaattcttttgattcaaattggccctaaaaatgtaagggtgtgtttagttcacgctaaaattggaagttttgctgaaattgaaacgatgtgatgaaaaagttgaaagtttgtttgtgtagaaaagttttgatgtgatagaaaagttaaaagtttgaaactaaactcggcctaagacgggatgtaaaattggacgaggagattacaaaattattacatgtactctactgtgccattacggtccgaccccaccaaccactactggctcagacacgttgtctacctccgctgcccgtgcaacttgcgccgcttgctgcgcccacgcgcagtcgcagacgcagccgatggccggctttgtttgacccccgttcctcccccccgtccccaactccaactgctcgcctagcaaagcagccttgcccatcgagacgcac

SEQ ID NO: 6445 - DNA, 2000 bp, Oryza sativa
  misc_feature (1)...(2000): n = A,T,C or G
caaaaagagataaaaatcaagcaattgtcgtgcaagtaccaatcaatcgccaggtcgttttcttctttccttacccaatggaggggattggagcagttgccgcgtccaaaaaagatcagaaatctgcctgctcgtcgacatggatgcattggatcatacagctacacaagctttctccagtcggattggtagattacacgcgtaatcgccgaccagatggagagaatcagagtgctaattcgcctcttcttcaccatgaacacgaagcttctcatgatcctgtcgccgatagcttcgcctgaactactacaatttctgtccattttccttactgccgttcgtagctgaaggttccggcctcacaggcagatatgttcatttttattcctgaaaaaagtatggagatttcataacggaacgatacgaactcatatcgccatcagaaattaaaatatgaaattgaattataatttgcagcgaaccaagtgagccttgcacattgaggggacacttcgcttgtgatcgtgagttcactacttcacttggctcttgttctaacatcagtggtcgtatcggtacctgcactactgtaccatcgccatgaatgaaccaatctccaggcacgcactctgaacgactgatcgtgattagattagaaagaaatgcaaatgacatagtcagtttagtccactaaccaaatggaccagtcaaagcgagtgttactgttaccattagatgaacaagagtaattccaattgctacctcgactagtttgttgaaactcgatactatcactatgctgccacttaagctaaacattttaaagaattacaataatgacttatgattttatcaaaaggccggttgcaaattgggctcatcgtgtacgggtaaaattactgttttttttccttttaataaagccatttgctactgttgtagttatgtgaaataccaaacaagttgtagtgaagcaatagtttcgatcaaataactactctcccatcttcattcatgtctccaataagtttattttcgactaatcattgtaccgaagtttatgaaattagaagataatccctccgtactcataaaaaaagtcgtttaggacaatatttaaatcaaaccttgggaatataaatcatgaataactctcaagttgttgagtttgaaaatgtaaaaattatataaatagatttgtcttgaaaaatactttcatactttcataaaagcatatacatatatcacttttcaataaatatttttatataaacaaagaagccaaaattgtgtttttgagaccgtgtcgctgtccaaaacgatttcctttacgagtgcggagtgagtaactgttttcaaaagtagctaaagagatgaataattacattaggatttttataaagtgagaatattaatatttttaccaacatgtgtgaaattggtgaaaaatatttttaacagaagggacagagtttatgaaatttacgcgatgaacatttatgtgagactggtgaagcgggcccacactgtcaggattgcctccccggtgcatgcacacatcctcccactctgccgccaacttaccccacagggggagggagggagggaggtgggccaccccacgatcgacggctgcccgtcctcccactcacgtcacgtcccaatctccgcgcccccgccgcgtaatcccgcgtccctccctcccgcttctgctacgctaaacccacccgagtggcttccttcggtaattaacccccaactcmacgcccccattaacaactaacccccmacccccgcgcgtacgtttgcagtctaacccctcggaaactccttactgttcccttcctcccacgcttcttcttcttcttcttcttccctttccccaacctcgccgtccttcgcttgctcacgcggccttctccgatcgcggcggcggcggcggaggaktnnnagtacggggaagggcgtagcgaggatcgagcggagacgtggttgacgag

SEQ ID NO: 6446 - DNA, 2000 bp, Oryza sativa
tgtagctgcatctggttcaggaggcacagtgacaggcgtagggaggtatctcaagatgaagaatccatccataaagctgatatgtgttgaaccagctgaaagtgcagtaatttcaggtaacataaatgaccactatattgatatttgctctcctctcagcaatgccacacaaactgaatgtaaaactgagcaagtgagcttgtgtattatcacttgtaggaggtgaaccagcattccataacatccaaggcataggtccaggatttatcccagaaatattggacagatcacaaatagatgagatagtaacagtgaccactcaagaagctatggacatggcaagaaggttggcaagggaagaaggattgctcgttggaatatcttcaggagccaacgcagctgccatcttgaaggcaagctctttcattttttttcagcaaacactacagtaatgatttattatagaaacatgattgtcaattacattgctcctctcaatttgtgtactgattgataggttgcagcaagggaggagaacaagggaaagatgatcgtgacgatgttctccagtggtggggagagatacctgaattcggagctatttgcgcaggtgaaggaggaatgcatcaacatcaacaaggcattctgctgacatgtgtaggggtgatcatgcagtgtaatcttcaaggcttcattcttggtggttgttctactctaatattgtaagaagcttctgtacattggtgttattactcttagattagaatcaattgtatggatgttcagatatgcaaaatgttacctgttccttgctgaatgctgagcctgtccgtggcctggtctggctataagcgaaatgtataattcacaatcgttagtcacgctcgtttggaaggtaagggaagataaaatcaatagtaacttcttcctctatgaaatgccagaattctcaccgaacttctgtgcatacatatagaaatattctatacagggacaacaaaactcacatttgttctttccatcttccaatatgctgttacccatcattttgggcagctgctacactggttcttgtagcctcgttcttttctgattaaagatactacctccgttttttaatagatgacgccgttgactttttctcacatgtttaactattcgtcttattcaaaaattttatgcaaatgtataagatataaatcacacttaaagtactatgagtgataaaacaactcataacaaaataaattataattacataattttttttaagacgaatggtcaaacatatgagaaaaagtcaacgttgtcatctattataaaacggaggtagtagattttatcttggtttccattagtacgtgtttcaaacttctaaatgacgcatttcgtatggaaacttgatatatagaagttgccttaaaatatcaaataaatacactcttttaagtttgtaataattaaaactcaattaattatgcactaatagctttcttatttttccgtgccctaacttcattttcatctttagtagaaacgaacatcacgtgcaacttgacgtacagtaaagattcagtaatcatttagtaaactgtctcactacagagttaaattctgaccaaagacacacgttccagtcatataaaattttccgaagtagttggcacagagatagaactataactttataagcagaaataagaaggttccaagtcagtgagaaaggcatcaccgaaagtgcagggcagccctattcatacatggcctcctatgaatacagaattcccgggaccaactgcagaaaaacaactatttgtgcaaaaaaataagaactggactcttcagctggaaggctcacctgtcaattaactatgacaaaaggaattctcagttctcactgcctaacaacactatagagtatagctaaacaccctgtattcaatcatgcattcctcatctcttggcaagagatttccagcaaataaaaggattcatcgaag

SEQ ID NO: 6447 - DNA, 290 bp, Oryza sativa
  misc_feature (1)...(290): n = A,T,C or G
ggaggacrncgaaaaaatttttccccgccattgcaakttggatnaaganaccaaaacttgaaatttcgaatttaaacccaaccagccaagtcgtcttctcttcgccttcccctctccaccctttgtatataaacgcacacaagcgctcggaaagccaactcagaccgaacaaaaggatcaccagctacagagctcaccaccaccaccaccaacaacaacaacaacgcattgcaaagcaaggagaaatccgaagtccaacaacacccacaagaaaagagaagaagcgggga

SEQ ID NO: 6448 - DNA, 2000 bp, Oryza sativa
ttcagatctactagaaaagtaaaagagaaattctctctttccaaattcaaaccatggaccgggaatctttgactctcccagaccgggccctgagctgagcatcagcagcaccactgcaccagtgaacaggctgactagcacaggctaccagcagcatggcacaatggcagcatctcgaatcctcgatgctggaaaccagaaactcccccggcccccacgccggamacagcaaacccactcgtcaggtctctctaaatcccgttccacagcagcataccgacgaattgtcccgagttggattcaaatgtacatttcgaactataccctttcaaatgtatcatattttattcaatattactactactctgtcgttttagatttttgacattgtaatagagtatgattgacaatttgaattatatagagaagctgaaaatatttaaaaaaaacatgatccaatttaagagctagaaattgtaagagaagttaccattactagaaactcacttacaatttaaagcatgatccaatttaaagcgtacatattttatgtgatgtataactatacaatctatttagaaaataactgaaaattacaagctgaggaaccattttttttcatgtttttagaggctatagctacctaccaaaccagctagcttttagaatcttcgtctcctcaaacatgatccatatctgacagaagagtccattaaccctatcgggccacatgccatcatctctctcctcccccttcttcctcctccctctctctccattatctctccctttgtctccccttttccacctttggccgtatgcgaggagcagggctggagcagcggcggcggcgcaggtgtgcgaggttgggaggagccccctacccagcatctcagagagcagcgcgagtgtggcgagctggagactgtgggaggtgtggacgtggatggcggagctgtagaacatggtggttgggtccagcgtgaggcggaggagcgtgatggcgaggtcaagtaggccggatgcagcatacgtgtgctgcggacgaaagtccaccggctgctccaactcctgccccttgcagacggtcgaagaggagagagaggaaggaggaaagaggagagagaggatgatatgtgggtcctattttttttgaatgacaaatggatcccacatatatatttttttaattataatagaaccaaagcgccatgtcgacgccacagactaggtcaatactaccacgttagtgaaaacgccctccaaaactgccgagagagttaaactgcacctgttttaatagttgggggtcgagatatcctgtattatgtttcaaggatacgaatcagatttggtcactagttaagtccatgttcggttaatgcataagagtgagagattggaagtgatttattccacggctttttttttacaacagacaactttcattacccaacctgataaccaagccaaaaacatttattctacacctattgtgatgtggaataattctcctcaaacctctccagtccccttcaactccctccaaaccaaacaaggccgaagggagtcaaagtggacttatttccccgctgcaacgaaccccctctcctccggcccaccaaagccaccacactccctcgctgaccccagtggagctgctgtagcattagcatagccagtagcactgtagctgacccactactgccccagtcaagccgcggtctctctctcgtaccgtcccacccagaggcccgagccgtgagccgcaagggaaggggatgaggagggagagcacgcgccgcgcgccccgaccgaccggccgagtcctcctcctcctcggctcctctcctctctcctctctctacatctgcggccttgtccccactaccacgctctccctctctctctctctctctccttgtggactcgcagtctcgctcgctcggccgcccccaccacctgttcgaccgaacgcctccccggcgggcggcgaggag

SEQ ID NO: 6449 - DNA, 2000 bp, Oryza sativa
tgatctctaggatgtacgaagcctcccttgctcctcatctcatgacacagaccggcctgggcatccactccatttcgctgtcaatacatgccatcccctaatcacttgaccaatgtgacgctcatgttgcaaggaacaccggaatttcttctctgtccgccgccatcgaagttaatcttgccgatttagatgcatctatttgtggtcccgcgactcatctttacgactacgaggacgccatgtgcttaagtactggaggatgtacatgaagcaacgagtgagtgataagtgattggtacttcgtacttgggaggggacagaggaggcttggtagcgaattgcttctcctcttaccacgagaatagaggcgcgattccatggtgcaatcgaacacagatgagttatcttgatgatgatttttcactctttacacagccgctaaaagcggcaaatcatcaaatttccacgggacaatgcccgtcgtctccactgccaagttctacccttctaggcaaaccaggcaaccaagaggcccggcccatagtttcccgtctcttctgctcgcagacgcagagatccgatcatactaccaccaaggccgaggcagtgaggcacgagctgcaactctgctagctccatccgcggtcacgggagcacgtccccactgaggcctctcacagtgctcctagctggagggggaacctcgtgtgccacgtcggaattttgctaacgtgtcgcgtgcaaccgtgccttagctaggaagctcgtcaccaaacaaagccacgcgaaacctcgtcagttcgagggcgtgagcggcgtatccccgtattgccctccaaaaaaccactgtgggcggcgttgctcgcccttgcgtgccctcgcccagaaatcttatcgcgaaatccccgtattgccctccaaaaaaccactcccgccgcagcaaatctcctcccgccacccattattccggtccactgatttctcccgcctcggcaccgcagcaaatctcctcccgtcaccgagtcaagaaaaggcaagaaaatcttggggattggaagagatcgtttgtaggttaaacaacgaaaaattgaagaaatgaaaaagaaaaaagaggcaaaaaaatcaaaaagaagcggtcaccacgtgaaggatctctctgggtcttgaaacatcagcatgacaagcaaagataagaagcgagagcagttcttgattttttttcatcaagaattagagaacagaacatgcaaagataagaacagctaatcccatcttgttattagcaagtgatgtgatcgatcgaatcgagttgggaaaaaagatcaaagaacgcggccgcagtgcttctgcttctgctcgtcctccttgactaacactacctcctcctcctcgcggcggcggcggcggggagaggagatctggcgtcgaccaccacatccgccgccgcggccaccacatcccatcggcgcatcgtcttccgctggcgccggagcctcccgaggacgcttcccgcgmacgtcggtcgccgcgcgagccggcaatcgtggctgccggcaccggagggaggagaagagaagcagagccggcggcggcggcggagggaggagatccggcgcctcccgcgcgcgtcggtcgccgcgcgagccggcaaccgcggctgccggcgccggagggaggagaggagaagcagagccggtgccggcggcggagggaggagatccggcgccggccgtcggtggagggaggaggggagtcgaagcggtggcgatgcaagcgagatgcgggaggggatgcggtgcgcaccggggagaagaaaaagagacggccgaacacagagagaggggtagttgggaaattaagttgtggatttggtggctaggtcacgctcactgtgagcttcgtttcctttacttgtctctccatccaattaggtggtgggtgttctttgtgccaactttttaaactaagggtacggccactgtgagaggcctgacaccgcc

SEQ ID NO: 6450 - DNA, 2000 bp, Oryza sativa
aaattttaaaatcagctttaaatctgaagttgaaaaatttaaatttcggttgataagtacaaacataagaaaaagacgaggcctctaatcgcgatgatccagtgcttacagatggagtcgccgagcgcgaagtggatggatttggcccagcgcgagtagacgtcgggcttggacggcggcgggatgccccaggcgtcgaggtcgccaaccttgtacatggcgccgccgcagccgtcgatgaggaggagcagcgccaccgccgccgcggcgacgagagatgccaatgccgacgccccacgcatccttcctcgcttagctctcgccgcttttcttttcttctcgtcctagcaaagcaaagcacaagcaagcgaccagtgctcacactctgccacctccttgttcgtttctttgcctatttatgacgaggcggtttggatcgttggaggctaacgggcggaattgaccgagagagagatgtcgcggctcgatcgatcgagccatgtgtcggccggaatccccggcctaaaatcatcatgtaaagacgtgtgtgggtttggtttgtgctcgtaaaacggcaggattagtacttagtgggcactaagcatgtggtccattgcatcgttagccactaactaatgatatactgttagtgttagtaactcgggaatggatcgaaagggtttgtgtttacctgtgtctgtttggctccagttgggagtgggctggtggtgctgctcatcagacgcagcacgtgggtcagtggaggggagcacgtggattcagagatctgagcttttgtttttcttcgctagattatcgtattcgtctatagctatagcagctgtgtttgcgatgattagttagggtatgtttagttcacttgtttgattaaaattggaacaatataatgaaaaagttaaatgtttctgtgtaagtgacgaaaaaattagaagttttaaaaaaaaatttaaaactaaactcggccttagctatagtggtggtatggtcgagacatgggaatgggagttccaagcaatgctagctcatggagacagtagctcgtgcagctcgcccttgtatacaaaacagtttgctgcttttggctaaccacttgctctgacataccgtgtgtgtaccacaccacagtccatgttactgtcgcctctgccgtgtagcgcgaatcctcctcgtcgggcgcatgatgggtgagaaaaaaaataactgacgatgtttcattatatataaatcaaatattacagtagatttttatactatttaataattttatcttgatggacatatgatttgtttttttatgtatataggatttaagtgttgcaatgactttaaacgtttgttgcatatattgaaccaaattatttcatctagcgatctgaccgttttttgctttttttaagaattgaaatattctttcgctatttactgaaacattgtttttatataaggtgaaacaacgtccgattttttggaaaccgttgcttcatatattgtagcaaaatgttttataaagtgatttggttgtgtttcagctttttaaaagattaaaacatttttaatctattaactaaaaatttttcgatctacttaacgaaacaacgtccaattttttttttgaaaaaagaatcgggcgcccaattcgcctccgccgtgttgggtttgcctccagcgaagcacaactaaagtgtgtgatgggccgatcggttgatgggccatcatccaccactttggtcgatgggttaatgggtcgcctaatcaactcccgggccatcaaaattgcggcccatgaatcgcaaggtcggcgaccgcgaaaatatcacatcacacacacacgcaaacgcaagtggcttggggctccagaaagttgtgtaaaataataaagaggccgacgcggaatacgcgcagtcagctccgtgccgaaaccctcctcctcttcctctctgcctttcttccgctccacgccgccctccgccgccgccgcc

SEQ ID NO: 6451 - DNA, 2000 bp, Oryza sativa
tgtaygtgtgcgtgctttctttttattttttttggctttatcttttttcgatcatatatggtgtaggtatttaaattttgttttyttcttgggaaggagacgatcgtaygacttaagcacrtcacttttttttaccgggatagagattagtagcataatccyttttttgagaaatccctttttttaagctctaatccaatgtttaaaataactggtccactaatttaagtgaaaattgaaggttggatggttttctttttttactctaaatttctaggatttctctaattttattagagcrtcacgtgataatgtaggagtgtttgcagkacatttagtagacttttagtatataatagatttstatgatttctctaaattattggagarccacgtagcggtgtaaaagcatttgtagaaagtttaatgtacttttagtatataatagatagatttagaagatgctttgaaagaacattgattggatatttattatagatcttaatttaactaaatatatttatatttgtgaagtaatatattttatatttatattgtagaaagtcatattttaaataccgttgatttgtatgaatgtatgttttttctgtcttttttatgtatatgtgtatttgtttttcttctagcgaagattatgaaagttttgttttcaatcatatatacgtttgtacgtacggaaagtacagcagtgacatttgtaacgtacaaactcatacgtacggactgtagcgcttgtatgttataaacatgaggaagttattattttctaataatagatctaatctaatggtgtaaaataacgggtccaccaatttaagtgaaaatcaacggtgagattagatagtgctatgtggcggcttaggagcgtttgtagaagtgccacgtagcggcttgagagcgtttataggatgtttaatggacttttagtagatagattttgtcataaaaagttagaatctttaaaacaattgacaaaatatatcgggcctgtttggcgcagctccagctccagctccatccctcctggagctggagctcagccaaacagtttcagctccaccaaaactgggagtggagttaggtggagttctatcacaaaatatactagagttatatttaggagttgaagctgtaccaaacatgaccataatatatcattttacaaatattcgagtttaaatttttgaaaaattaatttatttttcaacgtttaaatacatgccagtaaaatactttgtttgactgcaaaatggttcttctctaactttgtaaaatggcattttatttgattaaaaaaattatatatcgatttacatttttcttggaaaagatttgactgacaaatttcttatttcgaactgtttgatcacaatttatcatcatgtatgagcaatgccctgcaatgtaaatattatcttatgtgaaacccttccatatcatattatgctttcacctgacaaagctaaaagccatagaaatcataagggcctactttctcaaattaccccacgggcatattcaccacgtgacaagctagcccaagcagttctcactagtaatcatgcaataaaattaaaatattatattaaaataataatttaggaactaatattaaattttcacagataacattcaatataattacaattatattttttaagctctaaatttgacccgccactgcatcgcccccattggatcatgctcactctgtgcgtaggttagcctcaggccctcaagtgtcaccattagcaagcagaacatacgcctactccgtctaaactgagacagaatcacgggcccacccgtcagtcacccaagctccaaaacccaaamcccccctaatctccttcaaaactgacacgagatggtgggtcccacccgtcagtgagacagccgcccacgccttaaagcccaaacccaccttaatagccacccactactcccactcccacttcgctccactccacgcttccccc

SEQ ID NO: 6452 - DNA, 2000 bp, Oryza sativa
gctcaggcaaagaaaaactctggaaaaaatatatgaacttggacagacaaacgatctacctagttaagacgacattcatgtgatatcacaatctggagttacttactccctccgtttcaaaatatttgacccgttaactttttagcacatatttaaccgttcgtcttattaaaaaattgtgaaatatataaaactatatgtgtatatgaaagtatatttaacaatgaatcaaatgatatgaaaagaataaataattacttaaattttttgaataaaacgaatggtcaaatacgtacttaaaaagtcaacggtgtcaaacattttgaaacggatggagtattaccgaaggcaattttttttaaaaaaaacaatagatgacctaggactgatgaactgctcctcatctagttaagactttcatatcaaaaatcattatttgtataagttttgtggtataaagaaaaattatagcattaaagatcaccgaaaaaacctaaggcaaagagaaagatccaattaaatagctgatcttgggactaacaaactgtccaattaaggctttcgtatatgaatcacaatttaatcgtaactcataaagtgtgatagagtttaacaacatgtacatgtatgatgtgtaggaccgaacactactaaagtgtagggtgccacagtcatagtaacgaatcaaatgctaaactaataaaaatatggtatggctaaaaatttagcgcgccaaactacgttcaccaaccaaacacatccttcatattacatgcatgctatactaacaaagtgcagtactccctccatccctaaatatttaacgctgttgacttttttaaaaatatttgaccgttcgtcttatttaaaaattttatgtaattattaatttttttcataccatttgattcattgttaatatactactactaaagtttttggaataatccataaaagtttttgaataagataagcggttaaacatgtaaaaaaagtcaacgacgtcaaatatttaataacagagagagtacactagtatagctaagatttggtgtgataaattatgtcaatcaaccaaacacactactattatttgcatcgctcatcttctatgaagttttttctttattgagaaggataacatccctataggtcatcgaacaaccgaaagcaaagaaaattaaacttttaaaatatagatcatctggaactggcaacgtgttccgacctgctgtcgtaatctgaaattattgtaacagcttcgctcaagctcaacttcacagtactaggatccaaccaaaaaaaagagaataatcaaaaccagtactagcatccaaagacgaaccaccgaggccggcacgtggccggcgcatgctccgatcccgccgtccatcgtcaagacgtcaacgcctcagccctcgttgccccaagtcacccacgtgctcccgccgattttttttttaaaacaattactccatgcatcatccttggccccacccgtcattgacctagccgagcccgtcgcttcgagcgagtcactaccacgccgccaagtcagcattcccctggcccacccgtcagcctccgagcgggtcgcgctcgcgtccacttcggctgtctcgtctcgtctcgtctctctcgagtctcgagtgagactgcttgggtggtactgtagtgtggtgtggtgttggtatagatagataggggagagtgtgaaacggggctagatgagaatcggattcctcctccaccaccgccatggattcgccgccgccgccgcgggaggaggtggtggtattcgcggtcaacagcgagcgcttcgagctccgccgtgacgggggcgaccccggggagtccctcctcgagttcctccgctcccgcacccgcttcaccggcgccaagctcggctgcggcgaaggcaaggcaaccccccaacccaccgctcttcctcctcctcggctgctttgcttccgttcgatcggctccggcgagcgagcttg

SEQ ID NO: 6453 - DNA, 2000 bp, Oryza sativa
acattatactaacatagtataacatataagtacatttagtgaataaaaccatactccatccgtctcaaaatataacaacttttagctcttaagatttgtcctaaaatataataataccgtacctatcagccaaagaggaattcttctagtagtatcggctatttcccctactttcctccacattttatcaagtggtcacgctagagacaaaaacagtcatggatagttataaggatggtatccttccaaatggggataagagaattcttactattctctttctttctctcaattgaagaagtaattggaaaataatacagcaagtacaaaaatgagtaataaaccccagtatagactggtacgattcaattcaacattttgttcattcgggtttgattgtgtcatagttctatagttggaatttggtttatcgttggatgaactacattgctgatattgatcccaagaaaaacaacttctctaccaatattctcttcccaaccaatcacaaccctccaccattcactttttccacctacctccactacacatccaattacaaccctccaccactcatttctacctactttcttaataaccgtgtccaacttcttatatttttgggcggaggagtactatatttgttatgttcatgcttcaaagtacttacaggcaatattaattttttaatcatagaaaaatatatttttttttataaattgcacccttcgttctatgaaaaactgaccttttgagattaatctacacaagtatttctttagatttatctttaaaagttatcttttatttcggggacgagtgagtaaagatcaagtagtagtcctacaaattctataaaattaaaaccacgtgttgcaaaaaaaaatagaataacgtaactataatgtactttaagccatactcaagtgcctaatcatgttgtactgggtactattcctaattcattcggttttcgcttcctttcgtactggaggggagtatagtctttcacccagtaaattctcccccacgacagctcacccctcccaaagtcaagtcaaggtcgtcgcctcccacctcctcctccgatccggccgccgcggaggcatgcgaccacaccactgtaccactacaccacctcactgacacgtgggccccacacgccacacaccacaccagcagccagtcatcgatcgagtcggcagcaatccccagcgcgcagaagaggagagagagagagtattcctcgcagaagagacgacgactcttccgccgacgacgtcacccccgtgacgtgggttgccccgtcacggcctcgcatcaccacacctcaccaccccccacgttcttgtttctttcccatccgcgtatagtagaccacggaggcagcagagctgcagaggagtagcgagagaaaaatacacgcgcgaaatttccggataagagcagcgccggcggcggatgtaggcagcgtttgctgttgctgtttttttccctttttttccgtctcgttttgctcccacttcgctgctcccggatccgcgtagggttcttgtgtcgtgtggtggggttatgacccgcggcgctgctctgctttgctcgatttgctgtgcttgccttggaggtcgcctgcttggctgcttttgagagtgagtgtgtgtgtgtgtgtgttttttttttatacctcttttctttttctgggagaatttcccgttcttgggtttggtcttttttgcgaacctttgaaccctttcttgttggattctggggggaagtttatttatgcttaatttggcggttcttgttttgtttcggggagtttagaaaattttcgaggctttgattcgttttgattttgggtggggggaatctcgtcgtgcgaaaggattcgatcgggagagcctaccggagtttggattctcgcgtgcaccaccgcgagaattatgaggggagaagtgagcttctagctagcatctagaaccttctagactctcctcgcc

SEQ ID NO: 6454 - DNA, 2000 bp, Oryza sativa
tcattgtgaatttgtgatgtagtcactgtggcgaggtcccaataatgtctgtactctgtagcttctgtgattggttgttttctttttaaaaaaacctgtgtatcgtctgtgtttcttttttttttatcacggattaggctgttctttgctagttacttaagaagatttgacaaatgaaatcagaacagttttaggccatcttctttttagctactcaattagagcatgtttggtagggactctaactcttaaatttaacttcaagagccgtgtttggagtggagttgtggagcagtctaaatctagctccacctccctagttcatccagctccattctcatttttggtgaagctgaaactgtttggtcgggcttctgcttcagaatagtgtgagagctaaagctctatcaataaacccttattatggattatttgctccatacttcaaaaatatttgattcataatttgtatagataatccactacaataattttggttaataacctattttacactgggccttaatttggtgagtttgagttagtacgaaacgaattcattttaacttgaacactctaaaattctacatatctatcgcggtgtgttgctatcgggatttataatttttgtaggaacttataattgtcatagacaaaatattaatatatgggattgtacagcccctttggcataacatttacgttgttgggatattattggattttactaacagcaacagatagttaaacctacgagcttgctaattatcagtactcgcttcttctcttttgttattgatttgcaataatgcactaaaccgcaaaacatatatggagttatggattattactagtaagtttgaatatttatagttacgttattgctagaatttacaattcagggtagcacgcataagaatatctaggattgtacgacccgtggacattgcatttgcaatcataggatattgttagattctggtaaaataattggtactcacatgatgttatagttccttaactaattggtatagtatccaccaactagattgctgcttcaacatcactcatgtttgctcttcgattcactaaactgcagtgcacatgatgttatacagttccttaattggcacccctcctaaaacttctacaatttaaaatttgtgctaaggcatagcaactttttttcacctcaaccagacacaatcatctatcactttttttcacctattttacttatctcaaccagtgacaacaatcccttatttaattttactatctctttaatatccgtaaaaatctcaagtatttatgtttttgagactgacagagtagtctactatttttcttgcaatttgtaaagtctactatttttcttgttatttgtaattacataaattatacgawttgtaaagatttggcacattttttcaagtgaaaatgccacttgttactttttaattatgcaataaaacctccaagctgttgcttgagatgaactaaagtcaactaaaaaggcagctttgggtgtcttgttacttgtagtagttttttaatatcaccttaatttacttcatacacatagctgtgtgatcgcagtaatgaacagatatacacgaattataccggcattaaacatgaaataaatatacacatttaatcattcctataccaagggctcattcctttataggaaagggctggggaaataaaatctaaccaaatttatgcgattattgttccaactccagctcatgctcatcaattcaaattaagtagaaattaaaattaaattccaagagcagctcacaacagcacaaaagaaaattaaaacttgcctttgggaatccaatgcccactcctccccatataaatcacacccgtcgcatcgctccgattcccaatccccacgcttccattccatccatctctctcgctctctcgcttgctcgccccgccgattcccgatcggagtgaggagctcgccgctgctgcttgcc

SEQ ID NO: 6455 - DNA, 2000 bp, Oryza sativa
gcgtgaacaccaaccaaaaaccaatgaagttttttttcttttgacaggatataatatggcgtgaataccaacataatatttttttctgttagattagtgttgttgctgaattatatggcgtcagcttgtggctaatcgatcgatatggtccaaaactaagacgcatatacctggaaggaactgaactgctgcaggatctgttcatcaatcaacatcttggctcggtargsttgtagtttcacaaatgcacatccgamsgtatatatcatatcatccattcatccccgtatatatgaaaatgacgatattttggcattgacctcgcacctatggaatcaccaaagccttttgtttgttattactgtagctatgttgtttccttcgtactagttagccttgcacttttttttttagataataatcatcgaagtattaacaactgtaaccggccgcttgttagtatcgatgaaaactacgttttcatttgttgcaaataacttgataaaaatttccttgacaccatatccgtacgttttccaaatcagcatggacgaactcctaatttcaccatatccattccctccaccaatcagcccaatgacctaattaactcggcatcttgttagatacatttccatcctatcatcccttggttgtagacgaggtaatttgtcccttatcttacggtgcgtttgaacattaagttcacctgggctaatctatttcaagcaaaataagatagtagatcattaaccacgattaattaagtattaattattataaatttgataaataaatttatttattgatttgaaaataacttctatatataatttcttttacaaaagtttcatttataagtttgggaaatgtgttaattgaaaaaaaaaacgaacacaatcttagcctacttttcacccgtagatagaaggaacacctcaatgccctcagttgaatggcaaacaatcagttaaaagcagaattatgtttaccaatgtgtgatggaaaatgaatggtcaatgtatcaatgatcaacggtggtccaaacaaaacacatcctatcctacatcttgtgccaccatggcgtattattgtacaaaagttaagtactagtataccgcagcgtgcaaagcagcatggtcaaacacatacgccatcaaacacaacggatgaaagcaaaggtcaaatgccccccaaaagcacagctaaaaagttttaaaaagaagcacacgacagcaaattcgcccccaaaaaaaggttttcgcgcgccggcacaacacaacacaacacaaacccgcgccaccacgcaaagcaaacttggcccaaagcatcacacacacacacacaccaaactaatcaatttttttagagtaattagacttggtttattttttttttcaaaacatcacatcgaatctttatacacatatatggagcattaaatatatataaaaaaacaaatagcacattttgcatgaaaatcacgagatgaatcttttaacctagctagtccatgattagctgtaagtgttacagtaacccacatatgctaatgacggtttaattagactcaaaaaaaattcgtctcgcatttctaaatgagttatgaaattagtttttttcatctgtatctgaaaagctcttttgatatccaatcaatcaaccgatgtgacatctaaaatttttattttcgtgaactatattttaaagaaaaaaaagcctaaaaagtcgtacaaaaaacgtgtcgcgaacctgcacaggttggtgcagagcgccgcacaccgacacacccttcccccggccccacctgccagcctgtacccacccctccctactgttatacacaatcgcctcacctctctccccctctcccaagtctccatctctctctcctcgaataaacccccaccaccccacctccatttttactcctcccacgagacagcacaaacccaatcccatccaccaaccacctcgccgccgtcgccgccgccgcagcc

SEQ ID NO: 6456 - DNA, 2000 bp, Oryza sativa
taacccacatatgctaaaaagatgatggatgaaacgatttggtgaaaactgattcattagagagacgctccggtgccctctacttgcagtattctactccaagtagaattaatctcgaccgtttattttaaagggtaaattagtaaagtgctaaaaccgaataggggtaaatctggcacttaatttttttctcatttgtgcgtcctatggtcaagcgtcgctcgatccctctccatcgaacagcagagtcgctctccatcaaaaggagagcgcagggaaagaaaagaaagcagcatatcgcgaggtcggccacgccggcgcttgtgcatcgcgttccatagatgtttcttgctgtaggtatttggtttccattcagcttgattgtttcatgtaaaatttaaatatattagttatatatctgaatattacacacgatggacaaatcgaaacactccaatccagcaatgacgattcaaggcaacggaagaatattccggtatgtttttttacgtagactttacaattgcaattacaacaagtaatatacattgaaccacgtacaaaaacgatgatatacacagataggcactttcaaaaccacaagctgttaataagctatagttttgaaaaaaaaaacatggccatcagtaacaagccaaagccacccaaagccatcttgagataatgaattcacaggaattacaggacatagcacaccaggaatctctcaagcgttgattgacgtagtgatcattagcttgtccaccttgtcatgctcagccattctgaacaagctcacttgctccggattcagtttactggcattcaacttgaatcccttcttctaggaggaaaaattatgaccaagaactggcagaacttgagttagacaagcagaaaaactattccgagaactagaggccaacgaaaaagaagatttcagttgcagattttcgagctgcaaacctacaagcagcaagaaaaacaaatcaaatcttgacctggcaaagcagaaaaagagtcttctcatgtcagctaatccgttggagagcagcgctatagccagcgagaggagtcttgagatgatgattcggaggtcgagagattggtggtcattggctccggaggttgcgggttccgcttgggaggcgatggattgggggctcgccctcgcggctgtgggatcaacggcgggtggagatggatagggctggagccgagcgtgggggaggaggccgacgacgaggaaggggatagcgaggtggacgaggtctcggcggcggccagtggcacggtgctgggtcggaggcggagatccgggaggcgaactcgtcggaaggtgggccgacgcgggggagcggcagagagggcgcagctctggcgatcccagacggagatgcgagctcgtcgagggcggctgaggcagccagtgcgacggaggcgagggagtaggaggcgtcgagggcggtggagtaggcgaggtcgtcaaggtggtgatgggagccgcggggttctctccgcatcggctccagatgcgcgattccggaaggacgaaaatatccctccacagataatttttcctggataaaagtacccctccacgattctactaccactaagtgtggtggtagtagaaatagatctgaaccattggatcaaataagatcaatggttcagatttttttctactctaggtagaaggcaccggagtgagactctataagaaaaccaagaatacttatgaaagtcaatacgattagttgagagtgtaatcataactagtgtcattttgctatcagtacctcactcaaagctttaagaaattgtcgatcctttccaaatttaatatggactagttgttatatataattcaacaagaggttacaaagctagatatgttcttccatgattttctatttcacctgaacatacagataatatcatttttttcctagatgaagacgatgctctcttgttttgcaattgcacccaagatttcc

SEQ ID NO: 6457 - DNA, 2000 bp, Oryza sativa
gacgaggatcatctgatacctcgcaagtatcatctgatacgtggtagaatcgcatgataccttataagtatcaccctataccggttaggttataggacatgatacctcgcaattatctccttctatgtggtaagaatcgtattatacctgataggtaccatatgatacctcgcaagtatcacatgatacctgataagtatcacccgatacctcatcccattttggagtgggatttcggtatatagcagccctcaatccgcaaatgcggcaagtcggtcgattatcatttatcaagagggcaagaacgttttgttgatcaacgctgaaagcctgtaatcatgaacgggttctactacatgagaaaatggaacaaaaaacgatctatgagtttacaagtcagaaagtcagacgcccatttgcagaaggcccattttaagtatatggaggctgataacgcgatccattttgagccccattctgtattgggcccggagcagcgcaacgctagaagattttcttcatcctatgccatcgattggccaattacggataatacaccaaagagtgtattagcgaaaaaataatttataattaaaacttttacaaataacttaaacatcaatgctgaaaaatgaaatataataaaatatctcaaaatcaactagtaagttttaaaatttaaattttaacattggcatatacgttataggcaaaagatgtgatccttatgctctgtttctgtagttcaaactcatcatgttctcggccataatatgcaacatatgacagttcggcccagaattcagagatcactattctcttcagaaaatgaccagctataatcactttaaacagtaaacaatgagatgcgccaacaccaaaacaatgtggacatcagatgcatgtttgcttttctttttcttattaaaggaagtacactcttcaattcatgtgaatccatttctcccttgcagatttgatcacctagtttgctgctgcacaattagggatgaaaacggttggaaaatatctcgattatttccatagccatgtttttttcccaaaaactgaataaaaaatggtaaaagcggaaacaaaaacaattaaaaaaccagaaatgaactatacgaacagaaacatatccagtatcaataggaagccataacaaatattggaaatattgaactataaaatcacacatttaactttgcataactatataatatgttaaaataaattcaaggttatgctatgtaaattataaattatcttcttttaatcttgtactcgagttaaggatttggttgtgaagttgatagacctctaaactatgtcaaataagaaaatagatcataaatgcatatttagaaatacgataattatcataatatgaaatatggtaattaccataagaataaaagtcggatatggttagtttgaagcaaaatcattttcaatttcattttttttctcatttatattttggttttcgtttgtacccacccatgtacacaataatatcacaagcccaaaatcccccgggccctggtttgcagatttgtttcgatcttacaaagcggccgacccaatcacccaacacggaacagtggtccctccctcacgcgagcttgccttggatctcacgtccaaagattccagctccctgcgccgctttattcccaggtttcgcgcaagacagcgtaaacaatcattggcccgatctgccgtacaggccgcgcgcagtgcacgcttcgcggaccaaacgtttccgtggtggccgtgcaccagtgcgcgcgcgcgcatgcgtgcatcgatccacacacacagacacactccccgcgtgtcgcgcctagccgcgagcccgcgacccgtgcgcatgcacacggccggaatggtaacgcaggcagaacacgccgcgcgtacgcgagagcgcagcagccgcgacgagcaacagagacgtgtaccgatccgtcacgacgtgcgcgcgcgcgagcgagagg

SEQ ID NO: 6458 - DNA, 2000 bp, Oryza sativa
tccatcggcacattattactggaccgagccaagagaatccgctagattattaaccaagcaggagtatatataaaatatcataatacatttttttaaaaaaattcttcattagtattcctgaaaaaactttaaaattaaaatttcttttaaatctttaactaattcgtttctaccctaaaataattgttataagctcacgctagtagcgggcgcagtaaaagagtatttgatggattattgactaaatatgagtatctcttctctctactacttaaaaaaactagaagagaaagtcggccttcttcattctctccattcctcacttacatctacgccgtgtttagttttcaaaatatttctttaaactttcaacttttccatcacatcaaaactttcctacacacataaactttcaacttttccgtcacatcgttccaattttaaccaaacttacaattttaacgtgaactaaacacagccctaaaaactaactatttctatctcgttctccacttccatagaaacattttctctcccataaaaaccattcactcttaaaaaaactgattctttttaaaaagactagtataaaacccaaacagcataatcggctcaaattcttccactaaactgaatwaaaagaccgttacgacgcacgggtctacagctagtatataaaataactgaatattgaatattgtgagggttwaatgtaaatcttcccaatggaggagcaagaggtgtgttcaagtgagaaaggaggagaaaaaggcaccgcctctccatgcattaaggggctgtttggtttccagggacttattctaagtccctgtcaaatcggatatttggacactaattaagagtattaaacatacagtaattataaaatccatttcataagtttggactaattcgcgagacgaatcttttgagtctaattacgccatgattttgacaatgtgatgctacagtaaacttttgataattatggattaattaggcttaaaaaatccgtctcacggattagctctcatttatgaaattagtttttttattagtccatatttaatactctaaattagcgtccaaacatctgatatgacatgggcttaaaaagttttagccccatctacacatcacacgcttgccttcttttctagtactgaggtggtatggtaggtcggtctgtagccagccagccagctgattttgcttccgccgcttttctccgtctcttctcgctcccttccctccctcccatctccctgcggtctccgagccatccacctcgctgcctctgccgccttcgtgtcgtgcgtccctctcctcctcctccgcgtgcagccacggcgtggcaggcagctaccacagcagccgctattagctcaaatcctcgctggttgacctcagctgcgacgactcttcaggatgagcgagtagagtttctgtggcctcgtttctttcttgcggattgggggtgggttcgtttgtttctttccttccttcccgcgtgtgaggcagtgagccagtgacacgcgggaatcgatcgaaaggccggatctttttttagcttgggaggaggaggaggaggaggagctgcgcgtgtgcaggttcgagttgactttcggggttggttggttggttctttgcttcgtttgtcgctctgcggatttttttttccggattggtggtcgaggtcgatcgaaacctcgcaaagattggacctttgccgcttgcctgctcggttcttatctcgtttggctgagttttgtgctcatttggagcccctgttcctcttgattccttgcattattggccatcccttgtctcgagagagcttatctgccaaagattcttgggctagaaggtttcttggttcattgcacggttgagtagtagtgcccaagaggatttgcagcagaggcacaaagtttgatgggtggctgatagtttggtggattggatagagaggagaaggagcaagagggagggcaggagag

SEQ ID NO: 6459 - DNA, 2000 bp, Oryza sativa
ctccccgaccaactccacctcgtccaatctctaccttggcatttggtacaacgacatctcgccgctcaccttggtctgggttgccaaccgaggaactccggtgaaggacggcggccatggcagctcttcctctgcaccgtcgctcaccctgtcaaactcctctggcctcgtcttggccgacggcgacggccgcgttctttggactacggacatcaccattattgcggcgaattctccggcggttgcagtgctgatgaacaccggcaacctcgtcgtccggtcgccgaacggcgccacgctgtggcagagcttcgaccacccgacggacacgtacctccccggcatgaagatagggatcaactacaggacgcgagtcggcgagcgcctcctctcctggaacgacggccccggcgatccatcgccggggagcttctcgttcggcggcgacccggacacgttcctccagctcttcatctggaaccagtcacgcccgtactggcgctccccggtttggacaggcaacccgatccccagccagctgatggtcaacggcaccaccgtgatctacctgtccgtcgtcgacgccgacgacgagatctacctctccttcggcatctccgaccgggcgccgcgcacgcggtacgtgctaacaaactccggcaagctccaagtcctctcatgggacggcggcracggcgcktcggagtggagcaagctcggcgagctgccgaaatacgagtgcgaacactacggctactgcgggccatacggttactgctactattcggaggtggctccgacatgcgagtgcctcgatgggtttgagccgaggagcaaggaggagtggagcaacggccgtttctcgcggggatgccggcgaacggaggagctgccctgcggcggcgacggtggcgacgccgtcttcttggagatgcaggggatgcagttgccggacaagttcgtgcgcgtcaggaacaagacgttccacgagtgcgcggcggaktgcgccggtgactgctcctgcacggcgtacgcgtatgccaacctgggtggtagcggcagcgcaaggaaggacgcgacgaggtgcttggtgtggctgggagagctgatcgacacacagaaagttggcccggattgggtgccttggggcatagttggtggtgagacgctttatctcaaagctgcaggtttcacaggtaaaactttatcggactatcttttcacttatactttatactttcaattttaaatttaaagctgatttaaggtatttttattaaaatttattttttagtctttgcttttagatcgttaagaacatctatataaaagttttatttataaattatttttcatttgtaaatatgtgatagggcttaagtctcgcagaatatcaggtcgcagtttgtatgtttcattcagagttgcttgacatcacccgctgaacattctttttaatgtcaaaacatctcattatagttcgtgcaatattcccctcctagattcctttagtctccgggtgaaccttccacgtatgtttctttagcgacaggattcagcgcgcaatggtaaaagaaaggagctcctatatcttttgggtcaaatgaccgaatgatcaacggtgtgtggacaaactctagataagattactgacgagttaatgtgacatgtataatattgtaaagactaacccttcattccattcccctgacaggccgttcctaacccttataagctgaacttgctatttaaatgccagaagcaggactatttgccatggattcgtggaatgtcaatcctaggcatttcttaattctcaaaaactgttgctagtctgctgtaaatcctaaacatctgcattatttacttgcatgtcacgacccaagctgcagctcagcaatttcttactgctcctaatgcatgtctaaagaaattaaggaatggctatatatacgagcgaaacataggtgatctatctccttcaggccacagattgacag

SEQ ID NO: 6460 - DNA, 2000 bp, Oryza sativa
acttgctggagctgcgtgtggagcgccgccgcggtggaccgattaggcaagcgccttcgtccgtagccacgtcacaccgcattcgaggcctccgcctccttctccctcatccggcgtgcctccgccgcgacgagcagcgaccggtagtgtcgccaccttacctcgcccagcgcgcggatgcggtagtggactgcgcatcactgttccgacgcggacggagccggaacaccgccgccgcaacctccccgagctttggcgtcctccatccggcattcggcgcttgtctcgctgccgccacgagggatggaaaagagaatagaggaagaggctggtagatgggactcacaagctgactcagctagtcatcgaagtcagctgccacgacatatgaaatcgccctctaaaccaccaagggaggtgatttgccctggtttcaaagctgaaggaggtattatacatggtatttcggttgagggacgtgattcaaccaaagacaaaagttgagggagtacaaatagacttattcccctagcttttcccggtcgccagcccaccgggaggaaagccttgacgaacgaactgtctcgtgttcccatgatcccatccaccacacgacttttacgcactcaaaatccgcgtagctttggtcacgtctttattgcgtgccaattatttcgtacactagtcgcggaaacaccacaagtccacaagacacgcgtcataggtggcactggcacagatacaccacctctaagagcaagtttaatagtatagcccattactaactccaatttatctatagtcaatctaatagctaatttatacaatagttgcttactatactattaatatatggtcccacatgtcatacacacactgtgtcttggagtccgtgctgcagctggctacagatctgtagcccgctgctcttctctcttatcttttatctcattaaaatatgcttatagctggctaatagtctgctattgtacctgctctaagagcaaggtcaatagtatagccagtagttggctctaattacatccatgtcattttacagttaataatagagccaacctatacaatagaatggctatactatgctaattacagtttcataatccgggaattaattaagcatgcacatacttgcgtatgatcaagagtgaactctgtctatgtaggtagttgtgttgtcgcctgaaaataagtaccagtgccgcgccatggcatgaatctggcgcatgggatcaaaaggggtggtgatgaggcccacaatatgtgtttttaatccgtgagatcgactgcacgcgagctttccgcatgggaacttgtgctatcgccgggctgcagatatgtcgctcgctttattctctctccttcgtttttctcttctccatgtaagaatagcatgacgtggaaatttttgcagcctgctgtgtcagcttattgtactgctctaatcgtcacgcgtctaggtaatcaacgataattctactagtatactgtttataaagaacctgtgaagattacattacattaattaaccatataaaaattccgcaaaactcttgcgccctagacccattctcgtgtggggacagttgacagtgggagcgggctgccctgtgcgacgcgcgatgcggcatcacatgctgacacgccccccgttccagatcgcagtcgcatcaaaaggtttcaaaccgtctcgcggtctcgccaaacgcgaaaagggcactyttaaaaaaaaagggggaaaaaaaggtagtctcggcatatccccagttccccacgctttcttcctcctcttcgtttgagcccctgaaacacggccacctcccttccctgcgcgccgaragcggaaaaccctagctccgaatctccgatctcccatccgcttcgacgcggaggtcgatcgcaagcagcttggtgagcaggggctatgacgagtggcctctgagtgtgcgagcgagcgtgtggttagatctgagggcctcgtg

SEQ ID NO: 6461 - DNA, 2000 bp, Oryza sativa
ttcattgcatacctagctagaatgaattggagagtataattcgatcatggaccaaccaattgtgttgtccctaaccatagttcaaacgcatcctaatcagtgatctcttttattctgatatgcccatgtttgtaggataaaatggctcttttagcaggctcttgctgacttcagtaaaaggacggtggtttgtggatatattatatttactgaaaaccatagtaaaatgagataactgtgggtcaaatgtgaacgaaatcattttggtattagtgggtcctattttcaccttggatttctggttgctcactagatccaacagaagcctttttcaatcctttcagtgtggacagttgtgagcacaatctttagagcaagtttaatagtatagccaagtactagctccaaatcatctagagccaatgtaatagccaattcatacaataattgcttactatactattaatacccggtctcacctgtcatacactcgttacgtcttggagtccgtgctgcagctggctacagatctgtagcccgctgctcttccctctcttcctttatctctttaaaatatgtttatagctgggttatagcccgctattgtactgctcttattaggtcctttgtttctggcaaatgggcttgccaaatttgtcaccttggatggatgcttgccaaactgtgaaaactgaacaatgcaagtgtcatttgattccttgatctcatggctgttgcatttttttagggtcatggctattgcattctagtgttatggctgttgcatttttcataatatatgttgtttatgtactattttaaatcgtaagccagctccttgaagtagttttatgagcattcaccaattatatcttgacttccactgcatgcatgcatgcatgcatgcatgcatgcacattcgttcagagtactaacctgaagtttgcacaatatacagaaatcaatcaaaatatattcaacactaacttttctcttgatagtatctccacaggtgaccagcttagtagcttactgtcggccagcaggctgcatccatcacatcggttaccgagcatggcatccactcttaaacacccagaacggaagaatgtacaggtaaacttgagctcagcattgtgcttctcagttgagagacagttaatcagctccttgacaaagtattagtactatagtacatggattagctgctaatcatgcagggcacacgcatcgaggcagggcccccggcaaaatctacatgggggcgcgtgtgtgaacgtgacgtaaaccgtcaaagggaagggggggaggctgccaggggcaaaaaagcgcgcgaatcgagtaccaaccttgggcccctcactctttccaacgagagctgactaggcacagccatggtggccccacaaagcaaccaatggcatctctccatctctggagctacagggcctcactttattggcagccaaagacaaggagagaagattgggatatttctctattcaccgctaaagctaactgacacaagacaacagaaagcaaaagcacccaaggtgagagagagagacatagagagcgagagagctgtacatggaggagtagtagcttcttgagaaagttggcaagaatccaaacatatacataaaatactctcggaaaacttgctataaagcacactccctcccgcagcccctttccctccctctcttgttcttcctctctcatgtgccattagccaatagcatcaaggtctcctctcttcctcctcgatcctcttcattttgtcttacttgcatgacattcttgttaactcatctatgtgttattgtatgttgcaggtttttgtacattgtagctgattataattcattcatatagctattcaaacaagttcggtggctgtccacattttagctttggatagccggcttgccagctgcctgcctagctctaagcatctcttgctgttggagttttgagaggaaggctagaggaagcat

SEQ ID NO: 6462 - DNA, 2000 bp, Oryza sativa
gagaaacaaatggtgagacagctggcccttgtggcactgtggtgtattcagtggaacccaagaaatcggccctcaatgacaaaggctgtaaacatgataactggaaggttgcagaacatacaggtgcctcctaagccatttgtttcgtatgaaagccatcctatgccataaaccatggaaactacaccacaatggcttagtaaatttttgggacttatactttatccacatgatgcatagtaatgtaacgcctagatattgcataatatgtactttgatcattccactgtattagccatctgaggtgagttcaccatgtaacacagttaagcagaaaagcatcgcattgaactcaacctgcaacatagtggttcagtcgtggtgattaccttgttcagtcgttgctgtggtgtatctcctactgtactgtactcctagctgcactagtcagtcagatactcccattggccttttcatgggtcagtattctgatggatattttgcaagacaatgctgcaaggaaattgtaaatctagtgttatcaaatggatgcattaaattgggtttgagcacgctttatgtttaaaacaaatgaatagcaaagcaaagggatcaccattaccattgtctatttgtcaatgacaaatgccagtaagaagtttccttttgttgcatattcctcctatccatgcgccattgaaagagccagggcctgaatatgtgagggaaacgtgagaagacaacgctgtagggcagaaaatcaaccatgccatgatactaaagcatgtcgcaaaataaatacctccatcatcaaatgtcagggagggggaagcaatctgccgtgaaaccatcgccgggcgtcgtggtggcgtttctagagatccgcggcggagcgcggggtcggggcagggcgagctcaaccgctggatgcgctcagagccagggcagccacgcgcagtggcgctgggagcctggaagtcgggttgattttggcgccggcaccggcggcgccgccgccgtctgctggagcgccgccgcagcccgcaggtcgatggggaggggggaactgtggggactgggttcaagcccaacacactatcccgttcgggcccaagctcattcaatgttattccgtcctggcccatcacagaggcaaccttgctgaatccggcccacagctagacgtaggccgggcttaagttgacgcagatgagcagtagataaaatgcatacaaagatcgaaagtgagatgaactcaaggcattacgcaaatgggcgcgctgagttcctgtttcaaacccttcaaacataatcagcatgttttctggaagtggccccgacaaaaagaaattgctgagagcgacacatctatcagatatattggagagcaaattgttgcaagatatccaaatcaccacagaattactacaaaaaagttttaacacatcatgccggatagtccacaggtcgccgccggtcagggatcaacaacatcaactaggagatcgtcaccgacctgcactgcaccaggattgcaccatcgtcacctgcaacttttgggcagacaggtatgaaaatcatccataggtagtagaacaagtacggtatctcgtcaaactctcgtatataatttgttgtgacataattggatgatagaaatatacacgaccttaagagagagattccaacaccacacggtaacagttaaggtgaaagaaagagacattttgggcgccacactgttgacggcaggcatggttggcaagtcaaaaagggcgtcatagaacgctgaaaaagatgaggaaagcacgcaaccacgtagtaatcacaggatctatgatatgcttgcaggcaaatcaaaacaattgctaggtcgttgaccgaagaccgttgaacaatttcaacacgcagaccatgtgaacttacacaacatactgatcgatctgctgtctccttcttccgctctacaaacggagtcaggcaatcgaatcacaacacaa

SEQ ID NO: 6463 - DNA, 2000 bp, Oryza sativa
ccggttttaattacttaaaaactaataaatgcttattcgatactccaaatgattttaaatggaaaagtgataaactacaaagttatagatctcatcaagatctacaacttttatataaagtttatctccatccaatatcgtttgaaatatagatctgagattttttaaaatgtgttttatattttgtaacgaatatttggatatctaaaacatcttaaatgaaaaagttactaactacaaagttgtagatctccttgagctctacaattttgatataaagttttatttcatctgactttatataatataattttaaattgtaaaattatagagctaacaagttatgctggaaaatttacatttaggtcccttgccgccctgtggaagggcgatttttaaaaatcgcccttcttgagggcggcaggcgattagatttgtaaattttcgaaacaaaaaattatttttgtaaatattttaataaawaaaagtataaataaaaaaaattcgtgcaaacgttggccgagcggcacagtgagcgagtcgctgtcaaactgaaccgccggccatcttctcgcgtgccggcctccgtcgctcgccggagtataaccacagcatctacaaccataatcctccacatgaatagaaaagcagtatctaaggcacgtttttaattctgcctgcccttattgtagccttgaataccattctttggttcgtagcaatctcgctcatcaaacttaagtgcgagcaatactgctcactgacatgtgggccccacagaccctcgggcccacatgtcagtgagcagcagaggatctggattgcttgacgatactagaaaacatccatgttgctccaagaccttgagaaatgatcgacatcacaaaatttggacgtcccaatcacaacgtcgcggcgaaggagacattttggctcccattgttggcgacatgtcaagcgtccgtgcctcgactacgaaattaattaagaaattcttgatgaccaaaattactggcacatgaaaacgagagtaaattaagaagcaaaacagtcactactcgtaacatggtataggtggttgaccgtaggccgtcgagcttgttcaacatgtagaccatggatacggtcatggcctcttcttatccatcgttcaactcaagcagcaggtagctttggcactatatatacgacgtgaggctttggttttaattattattaagtgaaaacagcatgcggtcagtggttttggcaccatatatagaacatagtgaccactatacatcgggaaaacaaaacaaagttttggtgaatggagagcagcatactactagaacatattgaccattatatatactatgctcaaatttgtactaattggtttgacatagtttttcaattataggtggtgagctttgtaatttaaaggttataattccatgtgtctaaacatggtatgctttcattatttcaacttgaagtgtagcatctactccttctgtcccattttaagtacaaccatggttttccacgcccaactttgatcgtctgtcttatttaaaaatttttgaaaaaaaaaataaaaatataagccacgagtaaagtactattcatattttatcatctcgtaacaacaaaaatactaattataaaaaaaaaattaaataagacggacgataaaaattgagcgtggaaactcatgattgcacttaaaatgggacggatggaaatagtaaatactaaacaaaaatactaagtagaagactgagaccgagacagtgcatttagagatgctgatgagctgagaaacctgatcagttggacgaggtaaacaagtggtggatatgaggtgaggctgaaatcatgctatgactttagtggctagagtcagccggatcaacctgttaattctgtcaaaaaaaaagaagaagagagagacgtgttaattacagctaaaaaactttctaatccaaaggcaaccgaaccatgaatccatgacacaa

SEQ ID NO: 6464 - DNA, 2000 bp, Oryza sativa
gtattttgttgattagagataccatcaatagaaggcaataagggaatcccagcacatataatttttagggaaaatttgaaccatgccacacaaattttgcaaaatttgtgatatgccaccctgacccatatgtcattgactcatgtggttcctacatgtcattgagatacgggtggcatatctcaaatttcgcaaaattagggtggcatggttccaacaaacccttttttttatgactaaaccttctctcaactcaagtacctatctaacattatttaagtcgcgtcgacttgaaacatgtataatttgataatatggtatatctataagggctacatgttagaacactcaattaaaccaccttataagtaatactacctccgtattttaatgtatgacgccgttgacttttgtctaacgtttgaccattcgtcttattcaaaaaattatgtaattatcatttattttattgtgacttgatttgtcatcaaatgttttttaagtatgatataaatatttttatatttgcacaaaaaatttgaataaaacgaatggtcaaacgttgttcgaaaagtcaacggcgtcatacattaaaatatggagggagtaatacttagcaagaactcaagtaggtaacaaatttctaatcgctagaaaggggaagtgttggaggagcgattctccagcagcgaggaagtgcagatctttccttgagtgaaaactcgtccagggggttagttgtgcacgacgtggaaaagatctccaagatagggtccagctccccacaagacaaatgaacacaagcagttatacaggttcaggccacctaaaggtgtaatacccctactcctgttttttttgtcactatctggatctggaaattataaactagacctttttcaaactaaggaacaagcatccctttttatatagcacgtccccgaggggctcacagtgccatttttctgctcttccttcgtgttgtcactcagctgtcttgtcgctgtcagttggttcccttctaatcttcccgagaaaccaaccaaaagtatatgattaagttgccccgggctccctgggcattgatctggcccaggtgggtttccatcctgcccaccacgcggcatatggtgggcctggcgatcctcaacctatccaagatagtgccacggctatttttcttctcagttggataagtcgggtgtcactgggcaggcgcgacacatatccagacgcctgttgctcctaatgactcagcgttagcgtctttttgacctcaggctggttggggttttcccccataaacatgtttcatttatggtagtgaacgcttgcccacagctggcagtgggacacgttcgccactcaacccagccttctggtcgtgtcccgcgcgcccctgaaacaatagttcagctatcttcgttcaagcttctcgaatatatctttgatgaaaagtagggtttatacttttacatatttaaaaacaaaacttgaataatacaaataatcaaaagtctgcctaaaattccatggcgccaaacattgaaaaccggagagagcgtagtagtgaacaacatatcaatatgcatatgtatatcatgtttaactatagaacattttaccgctgacaagttttgggatggcgatcgagattaccggccggcagcgcgcaacttacaacctaatatttcactgctgaagaaggaaaatttgtccaagatgctataaatttccgtgatgcatacattacgtctgtttctgtgtgtgaaaatacaagtagtgacagttttgtgtcgcagtcgcaaccgcaatcacattgtgttatcttgtctccggccagctcccaatcatatacctgtcgcgatgcatgtatgctactactaaattcgctgaactgacgaagatgaaactgacacatgcaccactccctctctttctctaagatctttttacctcactcgatcaggtacgacagctaagctagccatctatcgttc

SEQ ID NO: 6465 - DNA, 2000 bp, Oryza sativa
gctatttactcgatgatatgaatccagaggtttctcaaagaaaaagaaaatccgagtcagattttatgcatcctctgtgcacttgtctctgcttataggaaaaagtacgaattacccccctcccgaactatcacgatcgtccgaattatatttaataaaacaatgaatgatctctaccaaccaaacaatatctcctaggctagtatgtgtttttcgcgttaccagtggcgcacacgtggtaatctagtcagcattttatttaataaaacaaatgtggggcccacctatcatactcttcttcctctctctttctattctctctcgctcttttctctctcacgcagcgcgcacggcaaggacgggcggtgggagtgggcggttkgcgaggatggcacggggataggcggtcggcaaggatggcgtagacggtagcgcggacggtgcggacgtcggcgtggaggcggagacgacggaggagcgtggcggcaaagctagctaggtggaggactccgactccagtgactcgttgatgctattggtgaggtaaggacggcggcgagtagggggcggagccagttgtgggtggcggarggggcccgaggacgatggcggctggcgacggaggcggaggctgaccgggcacgcggggacgcgcggtgggcgatgggctcgtcctcctcgtcgtgggcgcgtggggacgcgcggtgggcggcggcctcctcctcagctgtggcgcacggggacacgcggtgggacaccgccgctactgcgggctcctcctcctcgtcgtgggcatgtggttgccgatggcgcgcagggactgcggtgggcggcgggctcctcctcctcgtcgtggacatgcggtgggacaccactgccaccgcggctcctctttcgagccatcgagccgcgtctcgtcctacctccccgsgcctcgctccccgtccgtctcacgcctctcctcgtccgccggcgatgcgccggcgccggcgcagagaaccgggcccaagggcgggaggaagagcgtgccgccacgctcgcctcacctcgctctgccgccatgctcctccccggccgccgctgccccgtgatagagagagagaggaagaatgagacacagatagagaggaaaagtgagagagaggaagagtggaagagtatgacacgtgggtcccacatttttttaataaatagaatgttgactggactagcacgtgtacgccacgtagaccaaaatcaccgcggattgagtaggggggtaattcgtccggtttgcatagttggggtgaagaatgtccggttttatggtttagggggtaattcggatgaccgcgatagttcgggccgggggagggggtaattcgtacttttcccctgcttatatgatcattgtatgaaggcaaggaaacccctgatggctactttggcgcttaggaatttcactgaaaacaattcattttccacataaactgaataaaaaaactttttttcgaggaggcgagcaggagttctgccgtttcatattaggagaaaagacttaaaaaaaaacttttgtacaggagtagcaaatacagtaaagaagaaaaaaaggcaacttcaggctaaaattttggcaaactacatttgggccagctcttcttcctttgatttgaaaagtaatccaaaggaatgtttcctggaccaaaatcccctataaaacccacctacactgatagttgtccaaggcagtatcaatccaactcacaaacacaaaagtgtaccaaagcacccttaactggtgatgttttataaacaccacttcaaaaaaaaaaagaagagaaaaagccatctttatctctcaaaagcagaggattacacaccataagccataatctttctttgtaaaccactgatcatcatcaagagtgaccaacacaacacttgctctcactcaccctctgtcactcttttcttctccatccatccatcctcattgtcccaacattgcatccacatgccaa

SEQ ID NO: 6466 - DNA, 2000 bp, Oryza sativa
gttctgtcaaaagcaaaatttacagtatctcataaacgtgttttgatgctaaaactgtaatactatatttgtctatctgatgcagtaaacgagaacatgagtaggagggcagttcacaaggcattctttgaatcagctgctctcattgcagccagtgttgtgcaggtctacctactgcatcgcctctttgagcgaaagctgggaacatcgagggtctaattctctgatagtaggtctccttagactcaccaacccaactgtatttcaatgctgcaaaatgtgtttacaatatctgttacatcctgctcagatatttagcatttttgttcagaattttgtaattcagttatttacagtactgtgctgcagtaacttgccgcctcatcagattcatttcagcgcattatatctatcgtcacatgtatattaggtcctaagtatttccacggtacgcactgctttaaaaccttttttgcgatcaaggtacaggagtgctagtattgagaaagaaaatgaagaaagaattccttttctgacaaagactcctaaacttcagctcatcagcattctactttagtttcacaatttcagaatccatatttcgatgataaccatttagtatgaagtattcaacgtttattgagcctgtattatttctgtatttagctgtctggaggtagaaaagctcagacgataccaaatccaaggagatgacaccaaattggtttcttgctaacatcacaccatctgattaggatacagttggaagccatgtgcagtctggttggtcctaaattcttttgctgactggattttttcgtgttatggataatgatttcacaaataatgattggcactactgcttgagccgataagcataacaactctggtattcgcatttcaatgtccagtttggttggtacatggagtcactgacaatcgagtttggaatctctgaccaaacataacagccgcccgtgacacgtatcaacatcaaggatgataaccaataatcttgaatttttcagtaaattctgcctgaagcactgtactttgtaaagttgcatttcagatatcagcacttgttctctgaatcagttgtaactttgtcagtaatttagtagcctgaagccctgtactttgtaaagttgcatttcagatacacgaaatcaggcatcagcatttgttctttgaatcagttctaaacctgtgaaaccttttcatgagtgtgtgagctccaccagaacactacctcactgttcatccacagttcatgctgctgttattaagctcaacaaaaaccttgatgcagtgatgattgcatagtttcaagggacaaggccatcagtctctggatgaatctgaggctgaaaaccgggtcaagttttgtcatggttcaagagaaacgaatgccattgtttgttcagtttaaatcttagcttttacagaacaaatcctaccaaaatgtacacaaattcataaatattacaaacttgttattagattttataaacttattctgatataaaattgatggttggaattataaatatttcgattgaatcatatcctaaacaatcatatcataaacatcaaatatttaggcctgtttagattctaatttttttcttcaaacttttaacttttctgtcacatcgaactttattacgcacacaaacttttaacttttccatcacatcgttctaatttcttcaaacttccaattttaacgtggaactaaacacagccttatatcggaggaagtagttagctaacaccaccttgcaatttaattaatactatacaattatcatcaacaaaaagctcttccacctttcamtcttccccactgcccaccactgtactgtacccccaccattcctgtctcttctcttcttcactccactccactccactccactcctctcccccatttggccactagcttaatccctcctcccccattggaaggaaggacaagctcgaggagctcctcctcc

SEQ ID NO: 6467 - DNA, 2000 bp, Oryza sativa
atataaaacataagagcacccgcaatagtaaagtaaggtgctctctgtaaaacatgtacatctcagcaatagactagattaatagtaaaccaccttaatagtatgtctacttgggtatctatagctctctaatatattgcctcgtttttctctatagactatcttcacattagtagatagctttgctctcttttttcatctcttccaagtaggaaaatatgctgacatggatctcttgtagagagtttatagataaccattgtgggtgccctaagtagtactatcttttcttcctgtccaaaaaatataaagcacttttgagcttctatacgtagatttaaatgagaaatggctatatttgattgagataagtgagtaggtaaacgctctatttaagataaattgtaaagttaatatattttgacggaggggaagtagcatttatgaaaccctagtagagctacgcttcgttgaccacactcctcgaaataaacatgatattttgtcatggaaatcatcaccgcgaattagtatatggaaatgctagatactacgcgttgttacggaatatgcatctttgatctattattaagaacggtagaatagttgatccagatgatgttgtttataagagacaagagacaatatgatccataggttgaccatgctaagtctacaaataattgagacgatgtatcttttgtaaaaagaggaacacaattaagatcattaattaatcatataagtattagaaactagtattaaagtaatgtggctttataagaaaaaagagaaatagtatttatgaattgcactaagtgagcaacgtatataagtataaagaaatatataggattactactaattaatgttcattaggacacgatatactcactctaacttcatctgtctaatagaataagggcccatttaatttagatataaaacagagaaattttttaaaaaattaatcttgtaggaaaatttctttgaaacaaatgattgaattatatcctatccttcaaaaatcctatggagtaaataatgattttggaggaaatttagcaagagctccaacctcttgaaaactttcttcgattatatctctctcattcgattcttgtatttcctgcggtctaatcaaatggttatttctgtgttttttctacgttcggtagtcctttgttttgcacttatattcttattagaaacatgtgttttttttatttctccgtttttttcattccagtgattcaagtggagcctaaagtttataaaactactagtacttaatattctgtttaattttaaacgtatgccaacgtttattgacaaactattaattgacaaactattgatagtcaatgtttcaagatcttgataaaatcttatgctaaatatcagatactcccacttgactgtgttctttccctcatgttcccaactccccctctcccgtttttcgcgcgcacgcttttcaaaatgctaaatagtgtgtttttcttttaaaaaaattatatatgaaagttatttttaaaaacaaattaatccatttttttaaaaaaattaccaatacttaattagtcacgcgcttatgtaccgctccgttttcatgggagatgttcccaactgaaacgaaactagcgaacacagccacgcacacgcttatgatctgacgaagtaccatgccccmacrcgcrcacacgagccacggcccggcccaccgtcgaacgcttcaacctgagctctgtagctgcttcatgcttgacctggtagtaaagccccagcccccagttatgaacgcgcgcgcaaaatcacacccactttgacgcgcgtaaactatataaatccactcgatgcctcgaggcagagcagtgcaaagcacaaagcgcgcacacacacacacctcgccgattgctcacgaaaccgatcatttccaagcctctgatccgtcgcaaaatcccaatccttgagctcgatcgtcagctttgtgcgcggtg

SEQ ID NO: 6468 - DNA, 2000 bp, Oryza sativa
cctgttgcaacgcacgggcacctaactagtattttaataaatccctacttattataaaaattgaagatatttttgtcggtatttkggtacatcaactgtgtttgagtcgtttttaagtccgtccgtttttgggaagacatatctgtgtttgagttgcattttagtcttgtttgcttttgaaaatacaaaaggagttgtataagaaatcttaataaaaaaactcacattacttgagatgaaatacaaactcataattgcagcccacgattttctttaaaaaaaatattcatacgaattcccaaaatgaattttaccctaactaaaccgtataagaatgataaaattaaaatagtatttacccgttacaacgcactggtattttttctagtctctactattataaaaattaacaatgtttttgccggtattctggtacgtcatccgtgtttgagtcggtttttaagtttgttcgcttttggaaatactgatccgtgtttgagatggattttaagttcgttcgcttttgaaaatacagatctatgcttaagttggattttaagttcgtttgcttttggaaataaaaaggggtcgtataagaatctttttaaaaaacacgcatgctaacttgagatgagtgtcgaactcttaattgcagctcatgattttctaaaaaaaatatccaaacgaattctcacagtaaatttcaccttagctaaaccgtataacaataataagatttaaatagcattcacccgttgcaacgcacggacatcttttctagtctctactgttataaaaattgaaaatgtttttgccggtggcttggtaagtcatcgtgttcgaatcggcctcgcatataatcactgccaatttaactattttatgtgtccaacatgtacgagctttaaacattagattttccataagaaaatttgcatgttcggatcgtgcctttggccgattgcgttttgtcctgtgcattgtcacaaaccaaccgcctccgcgaggttgtcatcttgccgatacggtctgttgggcaacacggtttgggacctgctgttgcgcacctatatcaacaccaaccagcagcagtcaggtgtgttgccgtgcgccgaggcaagcagcacgacgtaccattgttgattattctctacacgcacacactgtatcgagaagaattcctaccgtgttcatcagaaactcaattcaatacggtctgctgtgtatacgtgttccaaaaaaattaaaaaaaaagttcaggagcgatatcaaagccgagatctattactacccacatattgaatatccacgcgtgcagcaagacgatcagcaacaacagccgatcgatgacggttgccaagagaaatacaaaaacctaatcagagaaatattcaatcaagctactgcgcacatatatctttatctttactattatatctctatctctactattataaaaattaaaaatgtttttgtcagtacgtcatccgcgtatgagtcggttcttaaatccgtttgattttagaaatacaaatccgtatttgagtcagtttttaaattcgttcgcttttaaaaatacagaagaaatcgtacaagaaatctctttaaaaactcacatactactaacttgagacgttcggacacctaattgcagctcatgattttctaacaaaatatatatccaagcgaatttaacacagtgaatttcatcttaactcgatataataataagattaaaataatcttcacccattgcaacacacgtgtattttttctagtaaaattaaaaattttaaaaattctcatctggagcgttgctgggctcgcgcggcccacatacggcgcagatcgatcggggctgtggggcctgcgcgggagagagcgcatctagcgcgcgaggctataaaacacgccggattctgatctcaccgcccggcaagcacgaacacgatgacatcggatcgggtcggtttctctcttgctgtcttctcgatcgatcg

SEQ ID NO: 6469 - DNA, 1915 bp, Oryza sativa
gactaaagatagcgatctttagtccggattggtatcccggtttggaaaccgggactaaaggggggttacgaaccgggactacaaagggtttctccatcagtgcacactctaaagaaaatctagcaccaacccaggttagccgctatacatgaccggacgtcaccaaccctatggaaggatatgatgctgttaggtacatggattagttgctgtctagattacgtgcaggtaattaacacatccaggagaaaacactggacagtgcgtacgtacttaattagtgatcaaccaaaaatatgcatgatattgcaatccagctaattacgttaggtgcacataagccagatgtagtataagctaagccagccgtttcatacgacatatgcataaggatgcaattatcctgatgcacgcttgatttaatttgatgggatgcgtacatattttgattccttgtcctaaagtatgcaaaaatccctgtccatcaggtgtgttgtctacacacggctatgtctcattgtgttatatatgttgacttgaactttttcgcaaaatggatttcattaattggttccttttcaaagtgactttagtatattataggaaacggtgaagatgacctctataccacctaatttaatcgaccttgtgttgttaggtggcacatcaaatatcattatctatatctctacctataccttatataagtaacccaggggaaaaaaatcgaacccatgaattgtgagatcacaattcagagattaaaacaaggtatgccaaatatgagtatatagtataccatataaaataactcaaattcgaattaagaataaacatgaaaaatagcaattggctttgaagattaattacgtactctgctgaaaaaaaaaccmaaagaatctggaaagaacataagtgtgaaatttcagtatcttctcaacagtacagaagaattatttatattaaaaattgcatcatttttttggaaaagggatatatatatatacacacacacacaaacacacacacacacacacacacacacattcagacagaacataaccatatagccatgcacccgaccgatgctaacggctcacactcgccaaagtatggctagctaaattttgatcccatgaattttctatactctagcaggcctatcttcagccaacatctttttaatttcttccctaaccagaaattggtcatctaaggagtcaatttttattttctctaagttcaaacaaacttattttttttggggcgaatgtacatctaacaggacccacaggtagacgtgattttttctaaaaaaagatgttataaaattgcaccttgtatcaaaatactttgacatatatacattccaaagggagaatatgttgctagacacttgtaataattgattggttcagaaattaatcactaattgtccgtaaagggtttaattaatcgttagtggttacagttggatgatatatgccaaaatgaacggtgaatttcgaatctttcttgcatctggtggctattaattactttaggagtaaatttaaaaaactatatgtatgttaatatcaaactatcacaaactacttatttgagacattgtattataaactatagatttcgcaccaaaaatatcacaaaactacatatttaaagcccaaactcaaaaaactatggttttgttatataaacgttatatgtaaatatgtcaaccaaacgtcgtcacatggagaaaccagataaaacagactgacagtctggagaaccattaaaatcttacaagatcacacactgcaaactgcatgctctctctccctctcaacgcctatataagcacatccatcccccctatgatcaaagcatcacagaaaccataaacacacaggcatctgattagagaaatcta

SEQ ID NO: 6470 - DNA, 2000 bp, Oryza sativa
tatctgatctatcctgaaactattgtattgtattagtttcctaactaacagacaagatatttctttgataaattttttgcctgatatgggtaatataatcagccccattttggaggggttcttttcttcacgaaagagtaatgtgtgattgtacatatgtggttcctcagttttcctaagattcttaagatggcatcagcctctgaacgagggaaggaactattttatcaggtcaactaatttggccgtctgggactctgtaaaattttgctgcttcattcaaatataatcatcttataatcataacgaactattttatcaggttaacggagtgtgattctcaactcacgatcatctctatctctactaattgaaaatgtttttgctagtactttaatatatcatccgtgtatgagtcggtttttaagtttgtttgattttggaaatacacatccgttcagtcgggttttaaattcgtttgcttttaaaaatatcgaaggagtcatataagatatctctttaaaaatctcacatgctaacttgagatgatcaaactcctaattgcaactcatgattttctagaaaaatatatatccaagccgcgaattcctagagtgaatatcatcttaactaataaatcgtataacaacaataaattaaagagtaacgtgtacgaacattccttaaacttgtaggggtgtgtcatctaggtccctgaactctcaaaatacatatccaaatcctagaacttgtcataatgtgttatctaggtctcaaatcgtcataaccccttcaaaaatctacgaggcattgatgtgacatgccacacagacatgacatggcattattttttctttttctttttttcttctcttttttcccatttattctcttttctctatgacccgtgtagaaaaaaagaaaaaaaagaatgggaagaaaccgaaaaagaaaaatwaaagaagaaaaaaaaagagaaaaagacatgtcacgtccatgtggcattgccacatcagcgtcacgtaggattctagaggggatgtatcaatttgggacatagatgatacactttgacaagttatgggacctggatatgtattttgagattttagagacctttataacataaccttacgagtttaaggactgccaatgcactttactctaaattaaaataaccttcacccgttgtaacgcgcgagcttatttttttctctagtcttaattagtatcttttaaatatactcgtgatcgtgccgcgcctactggatctctgcttctgaccaaaatgttccgcattgaatcatcacaggactgaaaatcaatcctcgcaaaccacgagattatcagtatattaagtctcctgggaagctcacatgtatacccttgcaaactgtactgctatatgctaaattatctgcctgcatgatcattgaacgcaatcgtgagattctatggccttcttaagagcaacaaatgcacacctttctggacggggaaaccaacaaccaaatgcatatattgttgcacatcatcaaatgcccttcaaaattgtattagggcgcatgtgtatttcttccgttagatcaaaaattacaattcaaattaaaattcaaaaagagagagagagagagagagagaggattgagagagtaatcctgaaatgcaatgttttctgtaaaatacaatcggcttgtggtttttccccaaagaaacaacattggatgttactcctaattaagaatttcggcatttagcaagtactaaaaaataccagtaacaatttcattataaaaaaagataggataaatcacgatcgcaaaaactgaaaaagaaattctcaaaagaatgaaacagtttgcatcatgagaagaagaagacaagaagaggatgagccttcagtggcatatataaaaactggattactactgtactactctcagtctctcggcttctagactagggaagctcaccaacccaagaacaagaagtgatcggag

SEQ ID NO: 6471 - DNA, 2000 bp, Oryza sativa
gtgtgttcatggagcgacagactgtcagcgaaatcatcttgaagcccatttgcaacacaagctccaatttcaacctgtgattattcatggagttgatagactgccaccaaaatcatcttgatgaccaattcgaatgcaagcgccaacttcgacctgtgcttggtacctctatccctttgcggcgtgatcggtatcatccgcatcctcatcatcactgtcctcatctctagaagcaacaccagcttccatatcttccttctcaccttcctcatcatcatcatcatcatcgctgtcctcatctccagaagcaacaccagcttccatgtcttcctcctcatcatcatcatactcttcgtcttcttcatcgtcattctcgccctccgcaccaaactcctcccctatcatctgctcgccgcgaactgtcttccgacccttgcccttgcgcttcccggcctcctcctgccccatatgcatcaaatgcaggtactgataccttatccccatcatcgggtgcttgtcgaccagcatatgccgccggaatgactcccggagcaccaccgtctgcgtcctcagcttgtgagataagtagaagatccccgggtgcctcgccaacaccttcctgaaccccggcggcagccgcagggcctcgccgagcttcaccagcacctccttctccatcttcttccccacggtgaggctcagcacctcgtgcagcaccgccgcggtcctcttctccgtgatgtcgctcctcggtgtcaggtgtgagccgtcctcgtacggcgagatgtatggcagcctctgccagtcgtcgagccacttgcgcaccttcttgtcgagctcgaaccctcgcgggaacgagagcgggaaggggaccgcgtcgccgaccttgtacccgccggtgcgctgcgcgtaggactgcattgccgacacggcaaggtccttccggtagcagacgagctcgaggagggcgccgtcgcgggagagcgcgaagtagtccgggtagttggggaggagcgaccgggggaagtcgggggcgaggccgaggtcgaggcggaggcgggcgacgaggtggagcgggagcgcgcgggccggggccagcatgaggaggcgcaggaggcggtcggcggcgtcggcgcgggtggagtcgagcacctgcgcctccgcggagtggatccccgcgaggcggggcgtcggggagacggcgacggggtgcggcgagagcgcgaaggcggacgtgtagagccggaggaagcggagcgggcggaacgggaacgggatggtggacggcagcgagtggagcggcacggcgtgcggcggcgscgcccccagaggagcgcgtccttggcgagcaggaacggcaccaggtggcgctcccgatmcaccacgtggtccagcgcccggtcccgcacccacggcacccgcgcctccaggagccccctcgccgggacgcgcagctccggccccggccgccgctgccgccgcggcagccgcggcaggagggcgcgcattttcgctgcggttttgcgagggttttgggtgcggcgtcggcggcggcgaagacgacgacgagatgagcggatcggacggtgggtgacgcgcctgccgcttttagccgccgcgatgggtttttgggccgcccggtggcccatgttttggcccaaaatggaagcggaaatgaggaacagaaacttcgccgtgttgctcgcgcgcgcgtccatcccatccactccatatgctcgaattcgcagcgattcatttcatttgggggaaatttctccaacgagaagctgtgggtgattaatggcgtcgccatgaatccgatcaaccatccaggagcaccattaatggcggctacgaggtattcgtgaggtacacgatgagatcttcctcctcttgttctttcaccggagacaccaatctctctccgaattggaattgattcgcattttttgttttcatgtgtaggtgggcttggtgacgatcgacgagagagtccgagg

SEQ ID NO: 6472 - DNA, 2000 bp, Oryza sativa
cgctcattggggcgccgaggttgccattgctgcctccatgtgcgagagccatcgacgccactggatccatctgcgggagacatcgccggatccgctcatgggagcccatgcttgtcgtcatctgaaccaatggatccggccacgggagccatcgtcgttgcaactgacaaatccgagcgcgggagccaccgccgccgcagcctatggatctgcacagtctccgccgtcgccaccgacagatctgcccatgggagccatcgttgtcccagctagcagagcagcccgccggagtcaccaccgttgagggggaggatgccacgatgccgcagcggtggagaggggagtaggaggggctgcgggtggcggtggtatagagacagagaggatatggagggtgtgggaaagagacggagagtagatcgaagtaaaataataaacatgggacatgtggaatgggagagaggctcgagctcagcggattatttcttccaccccgttcggctcaacgttgttttctcgatatgtgtcagtttaataaaaaaaacgcaccggtggctatttcataggtaccagttaaattgtgtgattgaaaaaacatgcactgaaacttatatttggcggttttttattaaacaacaccaataatgtgttgtaagtgccgattttagtttagactcatatgagagattagaaggatggggagaaagatcacatgtgccggttttatattaatcgacgtctcatatcactttttttatagtgaaaatttctttaaaaattaaataaatctattttattcatttataataaaaaatacttaattaattataccctatccctcgtcttgttttaagtgacggtgaaaagctaaagcaacttgcacattagaactaagctcaagtatttgagtgaagccatggatacaagttgttctaaccgatgacatctacacccttcatctaaaataaatcaaatcttaatgtctagattagaacttgtctagattcataagaaaaactaatttattttgtgatagaaggagtatgccaatataaaaggcatgtgttttatactcctccgtcccattttaagtgcaaacataagttttcacgctcaactttgatcgtccgtcttatttgaaatttttttacaattagtatttttattgttatgagatgataaaacatgaataatattttattcgttacttatgtttttaatttttttcaaaaatttttcaaataagacaggcatttaaagttgtgcacggaaaatcatggctgcatttaaaatgggacatacgaagtattaatttgtcctaattaaactgactgcatatattccaaaacacaagtgaatttgtcaatgtaatcattcgtattttaggacaaatatacaattaaagtttaactaaatttgtagaataacatgatcaacatctataataccttattaggctacgatcttcacttattcctcacaaaaaaaaaactctttccactacaatagcatctagaggaaatccctgttctagccagctctaagcaatatatactactaccagctgtatcatatattaatcatccacataactcccttctgaattttcataccccatcttagtggagtaacatgcatctatgaccttcgcctatatwaaaaaaatgtaagtacaargaaacaaaaacgcttcccaaaaaaaaaagcccaggactacacctttttgtccccattttttttgtaatgatccttccgaacattttctccatagaccatttggaaatagctggcgcagtgatattttctattcgtcgtccaaaccctcctctccgtctcatctctccctgcgtgcggcggtgtgtgtatgtggccaacccaataaatacccgcgaaagggttgaggcgttgagccgcgagctacgactcaggaatccggcgccgcaggccgaggcgatcgagccgggcgtatctatcttgtacacacagtaaagctgccagca

SEQ ID NO: 6473 - DNA, 2000 bp, Oryza sativa
cggcggcttcgagcaaggacggcgcagctcctttgagtgacgacaacggtggtggatcccgatgcgacggaggtggaagcttccgcatgatgacgactacaacagatccgtgcgtgacgacggtggctttgagcaacaacgaccacagatccaagcggtggtgtcggatcttgcgacggcatgtttctagatttttggttttaggatttttttttcttcaaacttgtttttcaaacggacaacttagtgcgcccgcgtgcgaaaatacagttttcgcgagcggttgcgttaccctcttgcgaaaaggttgatttccgcagacacctgcgtagaggaggggcgcctagctacttgcgaaaaccaattctgaccgcatgcaaaaatcgattatgtagtagtatctatttaacacagctataaatcaggtgtccgatttttctaaaacgatcggtatttcaactcttaaaataatgttttagcactcaacaaaatatttcaactcttgaaaggagtgaaccccatttagcactagatgaaataatttgcttccacgtatgaaacaagcaatttttaagctattgaaacatcaatagatctgagtgaaatcaaagaaaaaaaataaaacaccattaaaacccagtgcaagatttttatcgaagtaatgaaacatcatgatgattggactaaggtattgaaaattcacaacgcacccatccattcttactgtgctcctcccctacgtgctcctggcagtgaagtgacgaagtcctcttcgagctcgccagcctcctggaacgcaagaggataagaaggacagctaccgtgtagatctgggagctaaggcctggtttagttgggaaaaatttttggatttagttgtcacattggatatacggacacacatttaaagtattgaacgtactctaataacaaaataaattacagattccgctaggaaactgcgagacgaatttattaagcctaattaattcatcattagtaaaagtttactgtagcaccatgttatcaaatcatggcactattatgcttaaaagatccgtctagcaatttatatgcaatatatgtaattggttttttcctacgtttaatacgccatgcatatatccaaatattcaatgtgacaacgtgaaaatttttattttggttactacacagcgcataagacaaaaatcatcacatagcaccgtgcacatcaccttccccaacacagttgaccacgccgtcatcacgcgtcaccctaagcgtgtcggacctccctctcccccaacgacctccttcactcgtgcgaagtcacaagctccaccatgaccttgtctcatccgatcccgccattgcgaggtcacctcacacacccgtctacactcactgtccggtcatagaggagaagtggagggagtgtgagaagggagggagagggagagggacctcgcctcccgcacttgcctgtgctaaccatctggccatggagaaggggaagaggagggagtgggagaagagagggagaggtgttggttgcagataagaaacgagtgctgaggaatgaggatagtgaggagcgcccgatatttgtgtcttttgtcagacgcgcaagagggagtattctccgtttgacgccgtgtttagttccgaaatatttcttcaaacttccaacttttccatcacatcaaaactttcctacacacataaacttccaacttttccgtcacatcgttctaatttcaaacaaacttccaattttgacgtgaactaaacacagcctgaaactataaaaccaaaaaaaaaaccctaaggtttcaaacgtttgactaaaatgttgttctataatacataagtacaagcagatgtaactgtgtttattcatgtgtgccatagagttgaaacaaacccaaccttccgacatgttgtccaactccaagagagtttcttaccatctgatgcatctcctggccatgctacccatcctcctacatgttcagtcc

SEQ ID NO: 6474 - DNA, 2000 bp, Oryza sativa
ctttgcaacctaacaccaactactccctccgtccaaaaatccgtccaaaaaataaagaataaatccactttggctgccttactagtggctaaatctgattcgtatcctcggactacaataccagatatcttcacctccaattattaaaaccaatgtattttgacaccttcgacggttttaaatgacggtttcactaatgtggtggtgttgacctggtttcgtccaacatggtattgatgtggcgcttgtggcattagaataaaaaaatatgagggacccatttatcattaaaaaaatattgtggggcccacatatctttctctccttcagcaaggtgggtggcgtcatgacttgaagggagaggcggaagggagcgagacagagcgactgcgccagcacctcctaccaatgttgccagtgaagagacaagtgaggagagagacmaaagataaggaaaaaaggaggagtcatagacatgctgaacccacacgttgagtcagccgatcaaactaaatcaaagtgccacgtcagcgaaaccgctctctaaaaccatttagggattcaaattacactggttttaataaattgaaaggtcgagatatccaatattgcggttcagagatatggatcagattggagctataactgaggataggttgggtttgagcgaacttattttttagggtgtttggtttggctgtttgggccttgagaacaattgcgatgggatgatttctaaaaagcaacatttcctttagatctcggttagcttcatgaaaaaatggtggaccaatccaacttaatagtacttccttttctcttattgacatgccggtcacacccttcaaactcttagagcatgtacaatggtctttattagtggtctctctattgccatgcaagtaaatttgatgatatggaagaaagagaaaagaatatggttgttatgcatgacaacggctcagagtcgactcatagcatttattagagcaaattttgttgcatgatggtgaaagaaaggaaaggagagtaataaaaagtattttgatacattaatgattagagaccatattgtctctaactgttgtagaatgctagtctctaaataacgtagagctcatatctaactctatctttgtacatgcccttaagagaaagagcatttcgatccttgtgctaaatacatagatgagaccatcctataaataaaacgatggattctcacttgattccaagccaaacacacgcttgttttagattgatttatttggagacggggaggaatagactcgatccaccagcgcggaacgcaccaacgggccatccgatcccgatcacgcggctcacaccgcacgcgccgacgcgcggaggcgcagccgacgcggatcccaaatatcccaccaacatgaccatgagtccatgacacccatccatccgcggtccatccgtcgtcacgccgcgccgctcacaacccccggcgcgagcgcgacgcgagcggcgtgatggagagcacgccgattcggtgacgcagccacaccgccatgcccatgcccatgccgcgcccacgggcaaaccgccaaccacgcaagcgcgtgtactactaccgaagaaaagaagcaaccgcacgaggaaaacaccgaaggggacggccgcgtgcgtgtgatcgatgagcggtgagccacacagtggccgcgcaccgatcgatcgatcagctgggccggccgctgcgctggggacgacgtacgcacttgtcctcatccatccctgcatctgcatgctatctgcgtgaccgcgacacagtggatgacatggcaccaccactgacactccagctgatgccggcctaagctagctgtcggcccagaaagcgtgcccatccctcgtgtatatagagcttggcagcaatgcctctcctggtaacacttctccctgtgtactgcactgcacactctaggcggctgaagcgaacgacaccggcgtcaagagtatcaagcacggcc

SEQ ID NO: 6475 - DNA, 2000 bp, Oryza sativa
gcaatgccccgatcggagccttcttctctcgcatcgcacgcgcgacggacgaattcgcgccaaccaatcgtccaggtgcacggtgcacccatccatagctttttctggtcgtttcaacgataactggagggttggtgtgtgtccctgtcagtgggcctactaggtgtatatattgagtttggtgaagggagaatgaagtattccctccgttccaaaattacacggtcgccgacatactactttgatcaacaaatatctatataaaaataaaatattttaaataaaaagagttacatattatgatagtttgtttaataataaacctaataacatcaattttgtatgattgattcttttttgctattaataatcaaaattaaaaatatttgacttattactatgttaaaaataattatattttgggacggaaatgagtactataagctcacaacacgaccatcatgatgttcgaggtgcaaaatcgatcgattcgactacgattttgggttccgtaattaatggagggttaatgggatatgctattgtcgtcgctgtactgtactcggtccaatgatgttgtacatctactgttccaaccgcatacgactactctaccagcgtgcgtttggtgattggcgtgtggacggaaggaagtcagccgttgggcccctgctagtgtgtcacaaaaacgtttgttgcgtgctccctcctctggtcgcggtagcgacctgcaattgttgcatcctctcaggggcagtcccaagccatagtattcataagtagtgtctatggtgccatgtcaataagacatcataatagaaactacactccacaacccatagtttcttaaagtgggtcattaataaatacatcatctatcttttctatcaatcatatttattctttatctattatgacggcactattttctcccaatgtaaaacttgataatgtctagtgcataggttctcgtgttgaagctgtttcttacatgagacccagtttcttcttctctccactctctcttaattaatataatgtcacataagttaaaagttctagtaaataataatatagttaatgacatagacaacatcctagatgtagggttaggagtcttcggacagtagcaaccctgttttgactccttttttggctgcccatccacagtcgccaccagaaaattcactgtgcccaaatcaatggaagcgcctactagatccatccatcttcgtgacagctccgagctttctcctggttatttttctcccaaaaatacattcagaacacgatctcaaatttaaactaatggagtgctactgcatttcttaattataagtcgcagcaccactcattaatcatttccatcacaggtaaatcgtggtgagctggtggttgctactgtactactagtactacctgtcgcagctttgtagaagccgttttcgctgaagcttcttcttcttccctgggcaaaataattttaagcaggcggaataatattgggataaacagggtggacaaaagcgtgcgatccctttctttaaccaaaccacgacgaaagcaggttaggtcgcggcaggtggtggtggtaggaagaagaagaaagagaggggaaaaaaaacmaaaatttcacatgcatcatgcatgaagtagtacatgtagtactgagtactgtaataatgttcagtttactggaccgtctcaacgggaagaccaaattaacgcttataaaataccctttttttgggcactgatcatggccactacgtttggtggctcaacaaccaggtcaccgtgcgatcgatcgattgctaatttattttttgaaaaggaagggaggaaaaaagaccgggtgtttggtggcgccaccaaccctgctctcgtgagccgataaatattgctcgccggagctctcggttgacgacccaaccaatcgactcgcaccaccaccagcagctcaagcagcaacagctcaaacggaggaagatctcatcgcc

SEQ ID NO: 6476 - DNA, 2000 bp, Oryza sativa
ttagcacatgtttgaccgttcgtcttattaaaaaaaattatgaaatatgtaaaactatttgtgtacatgaaagtatatttaacaatgaatcaaataatatgaaaagaataaataattacttaaattttttgaataagacgaatggtcaaacacgtactaaaaaagttaacggtgtcaaatattttgaaacgtagggagtatattttataacatgtaattcacccctaaaagcaactgtccttagtctattcaatcattaatttcaaacgtcacaataggaatgtgatatgcgtcaaggattcaatgtgacttagaattgtattggtcctttctttgcttgtatacagacatgtttctttcttgacgtacacatgaccctacaagaagacgtaacacgtcaacttcatattttttccacatcctgctcatctatacttcctccgtcccaaaataaagacatttttgaggttggcacgggtattaagaaagtatgtgagaatgattgaaggaagtgtgtgattagttgaaaagagaaactaggtaaagaagaatggttgtgattggttgagaggaggaggtaggtgaagaaatagcttcattttaggacaagatactgtgctaaaaatagctacatcttgggacggagggagtattacttaaaaagttgttagtagcagtgatgtccatttcctcgccaccctttattactagcagctgggctccacaatttatactattacaccacttttcaacaagtcatcccatattttactattggctccttcaaattttaaaatcaccaatttgtttgataagaaaatattagtattacttaaactaaattagtagtaatagataagcttgaaactcttttttttttggttgcaacggtacgggaactaggctagtggtacatacaagagcaccaaaagaccttgtggccctggtaagttttggtttgatataaaatccataaacttttgacttgtcctacaataaggctacaatgatatttttattatcaaagatacaaaatcaatgtcctacgggaacaatatgtactataaagatttagtattagttcaattcgtaccaaatataactcatatttataaaagttgcatggttgtatttattgtataacacatatatattttgctaatgtacgtctcatacttttgagtatattcaaagtttttacaaaaggaacgagcggtcaaagtgaaaaagtaaaaaaggtaaatagtattcaatggtgagtattattttaaacagagggagtatatccgaagttatttgggacaaacatgatgtttgcttgaggtgcaaagcgccgatgaaggaggccatacaaattgatgtaatgttagtatcgtaaatcaaaattgtccccattttcaaatacaaatacgtgcacgtctaatcttcatctattcaattcttttaggtacattcgccctaaagttagctacaacattgaaacattcaaacaaatatataaataaatgcatacataggaatacaatttagaaataactgaaattcggaattaaaaataagtaatattgtaagaagagttcatataaaactgaatacgagattaattaaaattcaaaataaaaaaataaaaaaatagaaaaataattataggacttcatgtaggaatacactttataagtaaaaaaaatattggaatgaaaaatatgaaattttgaaaaaaagcagtttatctagatgtcaatgatgacaaataacaataaaaaggagagaagcaatagactcataaaagagtaagatggtggtggttaatggacatctaaaaactataagcaaaaccatgaatagaatcccaatgacgattaagaggaggacgacacacagaccgttaggtagcaaggtcacgatagttggtgggacttatataaagtaaaaaaataaaccgcaatgacaatcattttcgatttttttaatctcaataataataaatagggaaggcaaca

SEQ ID NO: 6477 - DNA, 2000 bp, Oryza sativa
tccctccgtcccagaatacatgaagtttttttagagttggacacggttattaagaaagtaggtagaattaaatagaaatgggttatgattggttgagaagtgaaagtagttgggaaaagtgaaagtaggattgtgattggttaggaagggaatgttggtggagaagttgttatattttgggataaacacgaagtgctaaaagttgttatattttcggacggagagagtaacttttagtggtatctttatcttgtggattctcacattggaattcataatcataatatacatatatttaattgaaaattaaccctttttttacaaccacgtaaagcaatctttttcattttcatttgatagggttacatttgataaatgatagaataaattactccagtcatctaggaaataaaatttgactgttattttttaagcaacatcaaatataatactagatttaaatatactatattactcctgcgtcccaaaatataacaacttttacaccaacattctattcctagccaatcacaatagcccatcattcaatttgtccaattacctccattgcttaaccaatcacaacattccccattaaaatgtactccaataatcaaaactatagtttggatgggatgaatcctaatactagcatatgtcccatcgtatgctaagctgctatattgtgaggatgaagataactcctactccctccatcccaaaatataagtatttttggacctcgtcacagtcttcgagatgctactttgaccaaaaatatctataaaaataaaatgttttaaataaaaagagttgcatattataatagtttgattaatgataaatctagtaacatcaattttacatgattgatctttttattttattgctattaatagtcaaagttaaaaatggttgacttggcactatgctaaaaatacttatattttgggatggagaaagtacatttttaataaccgtgtcaacctaaaaaactcttatatatcatgaggcaaatgtaataataaagtagattcgtttaaaaatctaatgatggtatatactaactattatggtactacctcccccaacataattatatttatggcattcaaattttatgccagaaaaattatattctagtgaagtactacctccatccgtcctagaatataagcatttttaaagttggatgtggtaattaagaaaataggtagaagtgaatgatggagggttgtgattggttgagtagtggagataggtgggaaaaatgaatggtgaaggattgtgattggttggaaagagaatattggtcgataagttgttatattttgggacaaatatcgagagctaaaagttgttatattttaggacggagggagtaacaaattaattagataagatataggctgagtttgttaggaccggttgggaaccaggataacacggaaaacggagcagtccattagcacgtgattaattaagtaataacttttttttaaaaaaagtggatcatatgattgttttaatcaatttttgtatagaaacatttttaaaaaatataccatttagcagtttgaaagcggaacaattcagagagttgggaaaacttgctgccgaacacagctcttctagtttctcatctttccatccccatctcataatctttattttaatcaagtttacgtatggattgtatgcatgcagtaaacgtgcagctaatcttcaagaaatataattattccgagacgtagatagtaaataattagatttcccagtacagattgtcggtcaaagtttggcaacttaaagtcaaactaacgaagaagtacgcctatttccatgttctcgtgtcagctggtgagccattctctgktccaagtmcaaaggacagctatttaacaactccctcgctctctcaatcggtgttgttttggacgaacgcgagctgacagaggggagagagagagagagagagagagagagagagagtcagagag

SEQ ID NO: 6478 - DNA, 2000 bp, Oryza sativa
caaattttacaccctatcacatcgaacacgtttgaacacctgtataaagtattaaatataggctaaaaaaataattaattacatagattgcgactaatttgcgagacaaatcttttaagcctaattgctccatgatttgacaatgtggtgctatagtaaatatttgctaatgacagataaattaggcttaataaattcgtctcgtggtttactaacggattttgtaattagtttttttagtgaccgaacaccctatgcgacacactatatgataccggatgtgacacgacaaaattttacacatatgatctgaacacctccacactcactaacatcaatgcagatcctgtacacatggagtagtacatgatcttctcagtaatttaactattgagcagtcagtctcctccaaagcatgcatcacatgtcattttttaatactctcctagctagagtaacacattttgatttcagataggcctctatataaatggaagaagatgcagtctacatcccatatgctaccacacaagcactgaattaaatccagtcatccaagttccctaccctcctaccggtatggtatttcacattctatgattagtacctggagtgtcttctcttctgcatctgccaacgacatctttgctattaattagctttcttgctacatgcttaattaggttgatactaacatttacaggcagtaacacaacgtttggttgatgacggcatttaaatgtccataacttgctaaatggaatagcaaagctgtacatagtgcgaagatctattatatttcaaattaacagatgtccattgtttcagttttattttacatttgtgattttttccatgttctcttactatatgatttcttttactagtgatctaacgtgcaattttgacaaattatttttcttgattttgtcttagtaaaatttacagtaagtattatgtatatttttatgattaattagctaggtgccttgcgcacatctttttataataaagtaatgtctgatgactgattttttccatatctatcggtcaaagattcaacgacataatcaatatccaatgtttgcaatttttttctctgggtgaataagaaaacttgcatcagaatcatttcagagaaaaataaaagagttgcacaaataagaaaaaattaggcgggtacaattaacaaatgtgacaaaaagtacacgtaggtgatacatcagataatgggttatctgtgacggaccatcgcctttaaacctatcacatgcgtctcacctctgacgggttacaaccatccctgagtttgcatagatcctcacctctgacgggcccaaaccctcacctttgacaggtttgaccctggtcagagattaatggtcacagataactccacactcaccacccatcaaaggtgagggtttgggtccgtcgtcagaggtgacctgatggcgtagtgtaaacttataaaatgaaaaaaacagattaaattaaaagatgcacaaattttcaccgaagttgctaaaaaagttgcacaccacatactatatacactcactgtgcaagtttaggcagtcagttagctttacacatcgcttctacacttgaacaatacaaaaactacaagtatagatatcctcaatccaacctttctaaaatagattatggcacacaactttggtatactttttttcttctattggcaagcgtcaacatcaaagtattatttttccattttaatttaatgatttcttgcttttctctctcagtaaaaaaaaattaatccaaatgataagtctggacatacatatctagaaactgaattttttataagacacagtgagtaagttgttaggagtatattgatttagtaaatgataattaatgataaagaactactgttgagcaatgcaataaagcaataaaattacgtagtatgattttgcaattctaaaaaaaaggaatattgtctctagtgacagaagaaaggaacagca

SEQ ID NO: 6479 - DNA, 2000 bp, Oryza sativa
atgtcccaaaatttgacaaattttctccagaatatttgtcaacatatatataccaaaattgaaaaaaaaatgatgtccttggttgcaccaagaaattcaaattgggtaacagtctttcttctttgggtggggttaaggccaagcatagaggaataagttcactttacatcttatattgacatcgagtttgaattacatcctcaaatcgtaatactgaaaatattaaaccttcatcttttacaaccaggttaaataagatcctatggtagtatagatggttgtcttgactgacgtgacatcctagtaaaacaaaacatgtggggtccacatgtggcatcctagtaagggcagtagcagtgcgccctgtgattttggcgaacttcacatgccacctagatgaagaaccgcattagccacatactactttacaatgcaagttacctatagtgggttccactagtatctttttttcactttttatctccctttctctctcctttcctcctttccccattgcacagcttcctcctttccccatcgcgcagaaaacggcgggcgaggtggcactggggcggcaccggcactagggcgacaacggcggcggggcggctagatccacccttcctctcctcccccgaagcagcggcggcgttggcggcgcgacggtgccagagaggggcgactagatccacccctcctcggttgaggctgcccctctcctctcgccatgccggcttctcccatctccggcggcggcttcttccctccccccttgccttaccctctcctctctggtggcgtggatcgagtaaggacgaggaaaagcgcggcagccatctcaggcgtcgagtcgagtggagctggaggktagcgggcagctgtggcggcgctacctctctctccgtcggtggcctctcccctctctagcgctgctcctctctcccctctttcccctgtggtggtgatggtggcatcggggaagagcggggaacaacggtagtgccggcgacctgcggagccgggggcggcgacgagccccacgacggtgccactcctgtctcccctctttcccccggttcctcccccggatgcatagcccaagctattcccctccctccccaacactctaacaaatctgacgaggaactcgtggctaactttggctctccggacttcactttgttacgggagtagcagatgtggtatggaatccatgacgtggaatgttaggattgaatggtacatgtatacagttatgcaccgtgaatggcctaagtgaacatccacggttccacctatccctctcttcccgcatgttggagtactgaaatgggtcaccaaatgatgataccccatctgtccacgtctattaggaatgggccgttctaggctacatagtacacacctagcacaaagctaaactaagctaatgatggtacacagtagacgtttgcaggccatccggcccattaccgccgtcccaaaatacttatttttgagtttttattaccaattatcttgtttagaagattatataattattatttattttatttgtgacttactttattatcaataatattttaagtatgactttctttatatttacactaattttttaaataaaacgaatgatcgaaaattgaaagcaaaaagttaaaacgacacctaatttacagagtcaaaatgacatctaatttggtacggagggagttacaaaaatacgctttaaaacttacaaagcgtatcttatggcacctcgagggcccaaggctcaggcggctccgcggctatgcgccagcgccacctatgacctatacccgccgatgccacgtcatgcctcaccgaagcaacaaagcctcgccttttgtctcctggctagccccacacacggccacaccacgcgccccgcctcgaagcaacgcatttgatttccgcctcgtctcgtctcgtctcgtcacgcgcccccgcgccgccgcggaagcctcggagcagcagcc

SEQ ID NO: 6480 - DNA, 2000 bp, Oryza sativa
ttctatctctaattgcattgtgtttagagacgcatcggtttagttgggactgtttcagttaggtctgatctcctgtcttagccgatatatctctacaatcataatgttgttctaaatagatttgttatatccatcacattagacagatctatcggctcattgagtattagattatcatatacaatctcgtgctgcatcggttagattcgatctactagattgttgttgataatataagtcttgttaagccgataggttcatgctaatgttttatcggggtgctagccgataagttatttggacgttgcatcggcttgtagggattgcatatacatataagttggatttagccgatggcaacaaaggtttcgctggagatcgaaagccgatgcagccctgcgtcaggtgcccaagttccgccggaagataagtaaaaacctcagggaagagggtggcgatgcgccgagagtattattgatcgatagattgatagattacaatgacaccgggtgtacatatttatacccatagggagatactagtccttgtcggacaagaaagaaactaaaaaggaaaagataaagttcttatcggacactaaacacactttcctaaagataaaagaaaactaacaaactacgcctaattaatagataactgtcatgtcgtatccttcttgaactcgaactccgacgagatcgagcggggggtcggtggtctacgggctacagcttcggatccatctgcatcgccgggatcagagctcctcgccgccatcctccaccacctccccgcatccatcctcgcatcgtcgtcgcgaggaggtgcgacctcgtagtccagtgcctcctcttctcctctgtccctccacacgcatcagctccagcgcaggaggacgcgggacgtcgacggcggaggcatcgagcaggtcgagcggtagctttggcggcgtgcgggcgattgtgagtgcgggaggaggcaccggcggcggcgacaacacgagctcgacggctccgcctctcccctctccattccggcccttatgcgccgccgccgcctctcgtgtaacccaccacctccgttcctccctcacctgctctcctctcctctcctctctccacttggcgaggtcgatggtgaggccgccaccgccgccgctctggcccccgcccgccgccgccactgctttggccctgcccaccgccgctccagctccagtcgcccgtgctccccgcggccggcgaaggggagagaagagaaagagaaagaaagagagaagggaggaagaagaaagggagatagaggatgacatgtggggcccacatgtcagtgggccccacaattttttattttgtgtgtgaatgactaatgggtaccacgcatattttttatttctaataccacttaagcgccacgtggaaagaagaccgagtcaatactgccacgtatgcgccacgtcagcaaaaccgccctccaaaaccacccaaggagtcaaattgcaccggttttaagagtttgggggtcaagatatccagttttgtggtttagggtcatggattaggtkkmgmtyrcwkwtgagggtyatgaagtgaacttattcctttaaatttagcccatgacagacagattgggcccgttycaaacaaggcctgaactgtatgggccagaattctggcccatccaagcaaggcctacatcctcttttcggccctagaaagcccacttccaacacggcccatttattcttttttccgtttcattcctccgttccgttccacgctctggccatcaaaacccctcctcctyctyctycccccacaaaaccccactctccttgctccgcccccgccgcgtcgccgtcgccattgcgccgccgccgccgccgccgccgacgccgtgcgtcgcgaaggtgatctccgcgtccctagctctctccccctcctcctcctcctcctctctctctctctcctaccttttctccgctcgcgcgcatgcaagcg

SEQ ID NO: 6481 - DNA, 2000 bp, Oryza sativa
aaaacataagtcatgagttaagtattattcatgttttattaaaagttagatataaaaatttatgattgtatttaaaatggaacggagggagtacattactaatatttaaggctgagaaaatgctacattatcgatcaatcatttatgtggtaaatgtcatgcaaaaacggccttctgtctctgtgccctttcaaagtaaaaacggtcctctgtagcgagtgtgaagcagccagctctccggccgggccaatgcataactagaggagcccaaaccaaaccatgacaatgggtttgcacttcgcaaacatgccaatatgggccgtttgctaagccgagccctacgaatacaggacgccatcagtcaaaagagttcactttaggtttctcaatttgtcgctgagtctaaaagtcatccctaaacataaataacacagtacttcgtataacctatcctccaactcacaacacccacgtgagccccacatattagcgaacaactcttatccctcctctccctctccctcttctgggaaggggttgttgtgcacgatctccaaccccggcgtgcgcttttctccccataagtgggtgtgtgagtgcggttgtgaggacatcatgtccgacgcctcctccttcacctcccttgttcttctagttgtatagccggcacagtacccaatcatccaactgcatgatcaattcatgcaaaatcatatcagaatgtgattcaattgtagatcgcctttatcgaataatctttgatcgaagcaagaataatttaacttttaaaatagtgaattgaggcttaccctgagagacctcttcttggtgccccgcgatggcgcggcmaatgttggcgagctggtactcacataatccaatcggtcttgacccatcacaggcgtagaacacaagcacaagcgctttttgatgccaagcgtgtgcctttgcggtgcgacgggctttgtcggttggggcwtgatttgttggtgtgcttgcggtccggggtggggagggattgaataagtaccactccctagtgccactctgataggtcccacgagttgaaattttacagatccacctccacaatgatcgacaccaggcgcatgggacgggccccacctataaccatgaaacaggcatcgagaggtggtcctacaccgcaagctcgaagggcaacaacttggtgcaaccgaggaacacgacagtgtcgtttcccgatgccgtgggagggtcggtggtggtagggtgggaggaggtggtgatgagcggggagtagggagcaaaaccggaggagagggcagcgtgaatggagggaagaaggagaggaagagtatgaagaaaagttaggcctcgtttagttagcaaaaatttttgttttgggtgtcacatcagatatatggacacacatttgaagtattaaacgttgtctaataacmaaaaaaaatatatattccgctagaaaactacgagatgaaattattaagcctaattaatctgttattagcaaatatttactgtagtaccacattgtcaaatcatggtgcagttaggcttaaaagatttgtctcgcaatttacacacaaactgtgtaattggttttttttccacatttaatactctatacatgtgtccaaacattcgatgtaatgggtgaaaagtttttgttttgggaactaaacaaccccttagccactggcatgtggagctcacgtgagttccacttaccacatctgtcaaaaccggtcactatactgccgagtaaccaaacttgatatagtattgtgagttagagaatatgctacatatagtatttcggttcagaaatgagtttttagaatcgacgataaattaaggtaactaaaacaaagtgttcctcagtgaaatcatatcatatgtgggtaaaagaggaagaaaaatcacaccagcactgaaacccaatctacccccatccaaaacagcgactcgatcagccgtcgccgctcacccactccgac

SEQ ID NO: 6482 - DNA, 2000 bp, Oryza sativa
cgactcgtcctgaaaatgatacgtaccgctgtgcttggcctttgtgacagtaatatgatcacctgtaatttttttccccatctctgaatagctagttctgcagaaaatgattccttttcttttgcgttcttttttgttggtggtaataaactgattcttcggtgctgacacgaagataaaccgattttagatagggacatgtgtggattgatctaggcttattatttatttagttgaattagattggatcagctggcagccataacaatccacccttaatttttaaaaatgaaacgtgtaatctcagattttttttaaaaaaaaactctgaaatatccaaactaaaagaacaaaaaacagtctagttttgttttttagagaaaaagtcacaaggacccagcttatattgaacgctaatcatcagagttatgcttggattccagcttaccagcagagtacagaccaaaatgacacagcaccatcagcaaaccaactactagacattcagaaacgaaagcatcaaaatagccacggctggagacatagaaagacacaactcttcacgtttccacagtccctcaaaagaaactacacatcaatctagagctaccctacacctgttctactctggcgaagcccagcactgaactccattatctttcctatcagcaactccagctcaccaatctccacaccttggatcagatcgaggcctccactataataagaaagtagtttggaaaggaagcattaggggggagtagatcaatttatctctaaacaccatagtgtttctggtaatccacaaagtccagcatacagcagcaagaagcaatcttaacgttcaacattctagttttcgtgaaaaccggacttccaagccggctcaaaattaaaaatattcaaactaaattttaacttttttaaaccaaatttgtctgattttttttgctggtttaccaacagttttcgtgaaaaatggagataccgttcatgagcggttttcgatccggtaacgtgatcttgaaccctgctctcagctgagcaccatgcaataactgtcgtttcccctcgtcttcatcatcatcgtcagcagcagcagcagcagcagcagcagcagaaacggaagctggacatcggtcggctcgttcctccaacgatcttgcctggccacattcgccatggacctacctcgacatcgcgtgcaaaccgacgaatcccacacaccaacactggcacaaaacagaggcaaaaaaaacacgacaaaagcgagcgaccgccacgcccaaaacgcagcagaagcattgtgcagcaacgagccaaagaatcgatcgatgatggcgagtgatcaccaaagttttcgcagcggctaatgcgccgagaaaacgaaggatcgatcgatcagatcatcggatgggccaaggaccaaccaacgaaggcccccccacacacaccagcaagacatcattcgtgaatggcagcggtcgtcttctacctccatatgctctgctgcctcttccattcctttccaagaaagcatttggggcatttttatcccaagtactctgtttcttcctttttgtttttctttcgagagagaaaaataaaagggaaaaggcaaagaaaacaaaaggcaatggaataagtgaaacgagaggggaagtagtaattcttggtatcatcattttgcatatcattgctgacgtcactgctagctgtataaataggctaggtgtgtaagcaaacaagcctacactcggcttgcttccactctgcacactcaagctgtagtggccactattactagtttacttgcatctaacttcctccaagcttctaaccaccgtcttgccatttagggttagctgactgccaatttcaagaacataccggtcactcttgccataactgatcactttcctgcatatccagcatatatatacatataacagtaacgcacatttgaattgggtttcagtttacaatttattgctgctcaa

SEQ ID NO: 6483 - DNA, 2000 bp, Oryza sativa
attccaataggatgatcccattatagcacagtagcagtgctgcacatcagatctacctccgtccaaaacataattagttttagggttaagcacaagtattaaaaaagttgataaaatttaaaaggagattgttacaattgatcaggaagagaaagtggatataaaatttaaataacagaatatcataattggttgagaagaaaatatatgtgaaaagtgaaaaaattattatattttaaataaaatttaaactttaaaagttactacctctgtttttttaatatataacatcgttgactttttaacaaacgtttgaccatttattttgttttttataaatataaaatattaagtaataatgtttcaagatgataaatcaagttacagtaataaaacaaagagtgaattatgctttgggccacattttattaattaagtttcacttggaccaccttaaacatatattttcactttggaccggataaatttgccattgttgcaatttggaccaccacgaacgattttttgtcagtacaataaatgaccttaaacacatcagctctagtatatacggccaaatttctctatgtatggttcatatgtttgccaaaagggaagttagatatgacaagaaaagttgttcatggtagtccaaaccgcaaccatggtacccggtccaaattgaaaagataggtttaagggtggttcaaattgaaacttgggtaataaaaggtggactaaaataaaatttactcgattaaatcaaatatttttaaaaaattaacggtgttatagtataatagaaaatcgaagggaatattatattttagtacggagtgacgccactgggcacttgggcagcggaggcatcatccctgacgaatgaaccatcctcgattcctctctcaagaaagccgccaggaaaagatcgaggaaagaatccaaatctcgtataaaaaagaggaaaaatatcttctttttttttctgttcactctccatcacgacctgcggtgacacaagagccctccaaatccaaaacccataaataatgatctgatctctctcgttctcccctcccacgaggtgagagactgagatgtgcccgcgaccgcgagtcgcgtgaggagatgcccacgcctcgtctccgctaccacctcctctccgattgatcccaacaaggcgaggtgagctccagctcccgtgccgttcttgggtttttctccgatcctgggaagatgcgtgttttcatcttctcctggtgatgaagtgttgggtttttttggtttttttggctgcgatctctggggacgaggttggttgtgatttggatgttcttgtcctgtagctcttgtttggcttgggtggctgtggttggtttcaactctcgcgtagaggataactcggcgaaaaattttacccaaaaaagcgcagaaaggtgcccttttttcaggcctttcattgttaaaaagcttcaaactttgggaagaatagttggggtttggagtttggaccatgcggggtgctgattctcttgggaagataaaatccttgttgaatagataatagcctttcttgaactcctttgcagaagacatgttccatgattcgtgcctgccttttcaatattcatagattcaggaggtaaaaaggtttttgtgaaggttctgtagtcgtcctcttgtgtttaatcttgttttctgaaatcatgaagtcttccgcgtcttgttctgatccatgagtatgtactgaggtttatgggtggagtgagggcgattcgtactatttctaatatgtgcatcaaactgtaggcgctagagtagtcgattgctatggttttctgttcctagttgatcattgttccaagtatagaagttttgatgttaaattgatgttgcaaatacagtgcttattgattggattgccaatttatcatcggtttgctcaatgaatccaggggaagatcaaaactgagtgagggttgctaaggggacggtttgac

SEQ ID NO: 6484 - DNA, 2000 bp, Oryza sativa
taaaaagaacactactactgattgcaaaatgaaattaacataggtttattcctagtgcaggattcatttgaccttatttgacagagatccagttatcaaatccacggtatatttgatgtttgtatattcatagtggtttaaaatttaaagtttcatctagaataagaacaaatttatttatccaattgctatgcatgtaatagtacatcggagggtgaactcctcaagtgggggacagtgaggccccccttgttagttcggctggggcagcgggtgaaaatcgagaactcggtgagatgtgtggtgtagagggcctcgggcccctcgagagcgatgagacaaaaacggtttatacaagtttggaccgctaagaagtgtaatgccctactcctgtgcttgattgatcgactaagaaattcaggctttgagccaatgagaaccaaacgtgagttagccaaagaaccaatctctcttcccccactaggcttggacctccttttatatcttaaggggctgctacatgggcctataaatttgcctaggggaaagggaggataatcacgttaaatgcacgtcttgttgcttgcctcagaagccattcgcacgtccgccacggcatggggcccgtcaattctatttggctgacatggggggacacgcatgtcattcaccatttaatgggggaagacttttgggtccttacttgcaccgggaaacgaaaatcctgctctggctgggttagatgaatcaactctggctgtaatgagaggcaaagcaacctctcatcatcatgatgtgacaggagatgtcaggcggcggcgtgccacctgacatgcaaccagtgcgcaggcgcactaccctagtcgtatcggtcattcgactcgtcacagaccagtcatagatcgatcaggtgcactacacgttgtatttgatgcggcgtagcatgcccgctcacaccaccttaaatgtggtcaggtaagcattggggtcgtccgcctaaccctgcacatgcggcgtcatgcgacccttggcatggagggggcggccgccgtcctacctcgggggagtgccacgtgggtaccagggggagccttctctctctgagcttgatacccccggttccgtatcactgacatagtagattcagatataaggatttgtggaactagaaatacctagctttataaaatcttggatctagaattatgccaagagtttcaatctcattaaatgaggaatcctgctatatgtacgatggtgccatctgattactatctggccgtgttacggcataaacacagctaacaagcgtatacgaagatttatcatggcgtgaatcatctaccgtgtgaggctttctttgttgctttggtcaacggcaacgtcatatgtatatcattttcattaatgtcacatatgttaaagtgacaacgtgtcatgaaatttactaaggccccctttaattcaaaggaaatttataggaaatttagaggaaatttatagaaattttagagaattttatttctataggattttttcctacaaagccctttgaatcaaaggaatgaatcctatgaaatcctataaaattcctatggaatgtctcttctcatacaagttttggaggaattttaacaagagattctacctcatggaagaaatcctttgagtctttatctctcctcaaattcctgtgtttttcaacagtcattcatatgtttttcctgtgtttcgaaatcctctgttttacacttatatttatgtcagaatcctatattttttctattcctccttttttcattcatgtgatttaaaggtgccttaagagagagaagggaaaagttttatgtaaataaatttggtttactaacatgacttaaattttctagacactatttctaatgtcatcatcggcgtgaaaattcataccccatcagcccaccattttgtcgagttggggagtttgaggattgggcctgtgtacaagaggcagcgcaacc

SEQ ID NO: 6485 - DNA, 2000 bp, Oryza sativa
cctctccacagtccacacacacccacccatgacccatctcagcaccccacactgcgtgagctcactgcactgacagcggacagcctgaacccgtttgatggaggaagtcccgcattttttccgccgcaccccatagcgtggcaattgccaacggctacattttctcccggctcccgtcttttgtcggattgcctccctcctctcacactctcgctctcacccagcaggccagcacatgcacgcgagtcactgacatggggccccggagaagtgttcgtcccgtccccaccgtgtcaggtccaactgcggtgcagaggcacagtcagcgtctcctccccaaccccaaccgtcgacgacgcatccaaatcccaacaggtctagaccgtgtaaactactactcgtataacgcctgtagcttcgaggcagcttcgcgaatggcgatctcccttctccggccgcagcaccacgaccacgacacacgcaaccgccgcccaaaccgggagactccccacgccacgcggcccccttcgcccggtgcatccatccggtgtctggtgttgtgcccgcgaggacgggatcgcgacgggacggtcgctgccaatcaattaattcgggggcttgaataatggagcggcaaaacaaaagttaaattaccactgaccgcgtcctcgcgagtcacaagcttctctcttggtttctcacatcacacgggattaacgtatctttgactcccccgcgcgctcactcctccgttaatccgccgcagcgaccgacgtagtactagtaatctattccgtggccgtccgtgtttggacttatccgttttatcgtcggaaattacctcgctaacacgcatcttccttcttgttgtttactactagtactactccattaacgtatttctggtatagtgatatgatagctgggcaagttagtcactttatttagctttcactgtctccagtttaaagatcgaaatgaacgtaatcgtttccttaagacagattggctaaatgtattgacagcatgtaaatttaaattattctacatgaatattaatgcaacaattaatagaaatctgtgcttatttttctttctttaaataaaactaacatacatgatgttttctactagcactgaagatattattgaaaaatatttacaaattaccaacgaattttctggttagaccagactttctgaatgatattaaaaaaactttctgaatggagtaactgtgcattttctatgcaaagctactgtaggtatttgtaatttcttgttggtaaacaaaagttttacaccttgcaacagaacatttcagtaaaaccgaagcatctattcttctcccatttctttctagtggcagtgaagtcttcgtgcttatcggtccgtttccccaccgcacgcgtccttgaccctccccatatataacgcccgttccaacgggcaattcgccaaacccatccaaaacagaaacacaacccgaggaaaagcggaacacgcgagcggcgaggaggaagaagaccgcgtctccgagagagagatagagccctcgcgagtcgcgatgtcctgcacggtcgccatcccgagctcgccggtgttctcgccgtcgcgccgcccgctctcctgcaaggccgcgtccgcgtccgcctcgccggagtccgtatccgtcgccgcgtcctcgccggcgcaggccgcgcccccsgccgggtcgccgctccgccccttcgsgctgcgcgcccaacctgcgcgaggaggccaacgccgtcgccccagccgtcggccgccgcggctgcggcgktytcsgccctgcggggtccgtgcttaagaggcggcgcccggcccctytcgtggttcccgttttccgcggggcggccgctgccgccgccgccgcggcggtggccgcggtggaatcggatccgaggaacgaggtggaggaggacggcgaggagttcgcggtgtactgccggaggggaaaggggaggagaagggtggag

SEQ ID NO: 6486 - DNA, 2000 bp, Oryza sativa
agataactattgtatgaatgggttattagattagctatagataatttggagctaatatttagctatcatgaccaatttgagaaaatttgaattgcattatatgataatcaatttaggaaggagggagtaatggactataaggtaactatatacttatatgaataagagagataataaaaaaaataaaagatgttggctcttatataggagctagctttgcacgtgttccaagacaaatacgctgaatgcataagtgaaagtaaaagagaggcaaagaaaatttaaaaacgcccttatagctaattattatatatgttggttttaaaatagactaataggtggcagttaactctactattaagcaaaagacaccaagactaaggatgctaaaatattcatcattcttaaattaatctttatcggttaaggtgctatatcattttgtgtcccgtagttttactcatgctttaaatactgtatgtcattgtgcaaaaaaaaagttagtcttagttacatacgacgtattcaatgatatatatttacttttgcgcaaataaaagaaaagatacttgttaagagatgatcaaaataggataggatagaggaagtgcaatatatgatttttctattaatccatgatgagagagagatactttagaaaattcactcggcggatcatcgaatctccctaccatcagcccaacgacacgttaatcacacagccaagatgctctcaataatggccccatttgccccacgacgcaaatttcccaacgatggaaaacaaaactggttaatcacattcgcataacaaaccatcgatccatcgcatcacatggcagcagagcgcagcggccggccattggtgaatccggcggtcccccgtgcgggatgctcaaattcatcccagaaactgaacaagtatgtccacgttcatcggcaagtccagattcatagatatttccagattcattgtaatctagtactaaatgtagtaacatattatagttccgatccgtaaatatatctagattcattgtattagtaagtgtcacatctaatactccctccatctagttttgatagacatatttttaaatctgaaaaatttatttttgatagccatattttaatctaatcacttaccatcttaatgattttctcggatttaatgcgtggctctccattcttgcacacaagattggctagatgggcatcgagaaatataaatattaatgaatcgtttgtttacaaggaataactagtagtatatttaaatatatgataagcataattacttatttttgtcattgtggcaagataaaatatgactatgaaaaatagatagatgaagcattatagcaagtttaatagtatagccaactactaacttcaaattatttatagtcaatgtaagcaagttcatacaatagttgcttactatattattaatacatggtcccacctatcatacatacattacacatcttggagtccgtgatctagttgactacagatttatagtccacctctctctatttttatctctttaaaatatgtttatagctagcttatgatctgctgttggtctgctgttgcagctgctcttaagagagggagtagcccccaccaacccctccccacggtgcagggctcaccctcctgtccccagcctcacggcacccttgatccgtgatccgacggcccgatccgtggcatgacgcgcgcgccgggccccacgctgactagaccgccgcatccgaatccccaagaggggattatcctctcgcgcacgaggccgctcgaaccggcgcccgccacgtgctccccccggcgtcgcagacgcgaggccccggagccgcgcgcgccggctataaattctcgtcccgcatctcagcagcgcacagcatcacactcccacccatacgcatccatccaccgtctcaatctcggtagtaatcctcgcggcctcgccgttagttccaccaccgggcgccacc

SEQ ID NO: 6487 - DNA, 2000 bp, Oryza sativa
aaaaactttatatcaaaaaataatttataactttttcatgtgaactctaatgaaaacaaactttatattaaaattgtagccctcgacgcgacctacaactttgtagttaaaaagtttttgaattaaaactgtttagggtcccaaaatattgttgcatgtttatagattttgaaattttaattttaaaattacattttgggacaaaaaatgacttaaaataaaaaaaatcaattataaagttgtagatcgcatcgagggctacaagtttgatataatatttgtcttcattagagttcacatgaaaaagttatgaattatttttaaatataaagtctttagaccgtcctatttgacccagatgatattcaaatacaagtttggatttatggaccggggtgacacaactgaacaagttggaggatctaaacgagtgatctgcaagtttagggaccaggatggcacagttgaacaagtttgaggacctgaacggtcgatttacgagtttagggaccgggatgacacagcggtataagtttgaggacctgaacggtcgatttgcgagtttagggaccgggatgacacagcggtataagtttagggaccggtgatgaactttactctatataatatttcctagacatctttcatttcagttaaattgacaacattgtgttgtcatgggacatcgtttaattacctcatgttatgaaccagccagtttgatatgctccaaaggaccagtttagtgaatcgtaaagacataagtaaataatggactaaaaggataagttatgtaaatcgtaatcaaaagtaaataatgaagcagaatgcccagtctcgtaccggccacagccacaaacgattctacgtctcgaaaaacttgcaaaccccaaatttaaatttaaaacattatggggcaacagaatgaagattcatttaagcctaaggtttcgaacattctagattgctttttattaaataatcattcgtaaaaaaaagataactttcaaataatcattcgtaaaaacgtaaatgttcggattgagaattgtagaggccctcctaggagaatcccctccaaaatttggcgtatgctgctatttgcggcgcgtacatcccaacccaaaagatttccccaactaaacaaggcctaagtaaaagcgaaaaaatagttcgctttatgctcaacgcgcagctgcgtgctgccccaaagtcgcccaggctctccttttatagccacccgtcgactccaactcctctcaaaccagcgaggtggtactaatcgctcccaacacctcgcgcattcactctgacgcaccgggccgaatgtgttaggcccaccaaccatactgggccctagcccagaaatgtggtttgcaacgagaaatgatgtagcccattcttctctctttctttctattttycttttcagtcaggttagtatgcctgtatytacctytcgccaaaaaaaaaaaaarggtatactaccatatcatgtatgaaaagacaaaatattctggtattctcatgtgcatttcattttttaaaaagatataactattttataagagtatctcttactagtacacctttaatttaacacaattccagacaagagccatcaaagcatatactctctctctatattttttttatacaggtcactcctaccaagtaccaaccctcaactatcacattgatgaacaaaaaaaaataaaattagaaaatggagaattaataagaggaaatgaagagcatatatgtgtgagaaaatgacttggaagtcccaactcaacgaccccgcagtatacaggtatatacagccatcctatccccatcaaatccccaaaaagaattaaaaatcagaaaaaaaaaactttaatttccagtcttgctctgsgccgccgccggcgaccaccgcagcaacctccgccgccgccgccgccgtccaggaactgaccggccgagctgctccgtctcgtggggcgcgcktggcggcr

SEQ ID NO: 6488 - DNA, 2000 bp, Oryza sativa
aggtgcgtaggtgggagatcttcttcggtactcattttggggttgtgttgtgtgctccgttgtggcaatgctgatgctgtggtgattggttggtgttaaactgttaattgtgacaaatttgacgggacgaacagttactgtttataaacctatatatggggaactgcgatgttggtgttgccaattgaaattggatcgaatggcttagatttagttgttcaggaatagtcgcataccacaatttggtaacaacatatgcttgaattgcttgcaggtggtaagatctattcctatattaggttttgatcacttctttatattcggaactttcgggcatgctaattattatattggttgatagcctttcagatgataacacatcttagttctttacaatgagatgaattacataacttattctctattattattcataacactcattgattcttatcagtagatgctctctgcctatgtctgttaactcattaaactccaaaatgccattcatgcaccattcactcgtcattattccctgagtgaaagcttatctagtcatatctcctattactgttagttgtttgctagaaatgcatgaattgtaattttgcaactatgataatgcacagtgcactaacatgcagtgcaacaccattcatcatcttggacttggagaaataagaataagtcataattgtgaaagaatgggcatctaacaatggcaaatggcatgcttgtttactaagatgatctggtgctaaccgaaaaacatatactgaaggcttcattgtttatgtgaaaatgacaagtagctgtaagcttgaaacttctcgtttggctgtcagcatctggtctatagagtggaaaggttcaggtaataatggtggatgaagtcgacaatataatatttgtttatgagacaacaaccaggaggaaaggtctgtgcgatatatcatagcagaatttccaatgttgctgaaactcgtgtaaagacatttagtgtactggggaaggggtgtccattcaagtcaaattcaacatgtttcaatccttccaaaattccaaaataaatcatgagttcagtatagataaatttatataaatatgcaaaaattcaatgttagattcatcctatatgttgagatcgaacaaagaagctgtactgctagcagatgatgagatgacgaacaatcccaattgattggttgtctttttggtttctcgatatctggatgaatttacgttgaatgttttcaggtttgtgtaactctactgcactcatgaattctcttcgaatgtttgaatcattgaagcatgatcaatcttattggggacaccgactgcattctaactaaaatacttggctaactgtgagtaaaatttgctactagttttagagaagatgatgggagtagaattatggattcgatgctgctgtggatgataaaacatttattagtttggtttggttggaaataatttttagaccgagctatcttataaatcattgagaccattcttggttcatgcactcagagttattgccatatcattgtttttatgtttttgaaaattttttgaatttttcaaaagattaagttgcacaaaatagtacacgaacatgttaggtagatgcaatttggtgtagcattttacaaaatgcctgaactggtgcaacaaagaggtagatgtggtatcattgatctattctgtttttgtgatactgacttcttattggaattttttgtattgtttattagtactttatttacatttgtaagttctcacgatgagcatggttacagaaagcactatatgttagatgagtagaaaggcttgagcctagtggcttggggcacctagacagttcctaggaccaagttgactagtgcccttcaaccaattaacctatgacataaaagaaagacatcacagcattgatataaaaacactagagccatcaaggcagcgcaaccacctaatgaaccatcaaatgccaa

SEQ ID NO: 6489 - DNA, 2000 bp, Oryza sativa
gtgagagatgtcatttatttgaaaacatgtttatgaaagcttaattaatgttgtataatgtgtgtacattgtacaagagatcgagtacctagaggctagagctagctagtttctatatataattttttttgaggtaatttcctatatgtgagttggtgaaataaaacatcactcctgagagtaccagtatatatactcaatatatatatgcactagttctgatttcttttctctagttaactatttctttgctgtacgtaatgcccacaaggcaagagatctactacatgtgtgcggtgaaaacctatatcaacatgcatgtaagaatggggatttgcattaaacatgaagctagctagatgacgaaaaggtatcgatatgtactagagccagatgggcgtgtgaatgatatatagtacatagtactcccttcttttatcttatagagcttttatattgggaacaagaagcactgccaatgtgcatgccatctttcagcttttgtagctagtcactactgtgaatgcaactggggcaggctgtagaacaaaccaagcaagaagcaagttgatggaggtgatctcctaatcacctttttaccatgtgtctgatattgacccaaccaacaaggagtaagagtgcaagagtagcgtgtgtaaacagattcagagagagagagagagattgtagcaagcagtaaaatatataatgattaccttatgatcgacaataggtgtttgatcccatgatgagggcttttatcacgtacagatcctctctttaatcattcctgtttttctggctactggctagtgagtagaagctgtgatgacctgcgcataagagtgagtttttctttaatgtcgttgaatgggagctaatagtgagcttgcacaagaaaaacctgggactaattaactttgtaactgtaagtaataaaaataacatatgttacttatgccattttactttgcaccgaaagcagggccgtaaactttattttaaccagctggaacagcaaagctagcgacgaaagcgactcgtcagagggccacgtgcagctgtgccaaccgtccacacacacacacagggatgagacgacgacgtgcagccgtacgtgtcactgccaggtggggccccgtgcacaagggagcaaatgaacacgacaatcaggcaggcaagagggtccaggatatgataagaatgatttggcactccattggcccatgattgatgagacttcagagcatgtactgtagtggtcatcgtagttgtaaaaatcagcgcctccgcagtcaacagttagtacctttacttttcagttttcaccccatgtggcatactggcaaggtgagaagttgaaaggcaaggctctctctgcttcaactcaatccatccatgatccatctacgacgagtctactaccactgatgcagaggtgcagttgcaggaggttgtacggtcgctgtgacttcaactaccgagggttgctttgcaattgcaggcagcccttttccttctgacctctgcaagtaaacaaagcaatgagcaaccaaatcctgtcatgctaactccgcagttatagtcagaaaagcagcgaacttgtatgggccagctgaaatccttacctttagatttggcaatgttttactggtactgtacatggtcaatgctttgggatggagatggaggtaaatctttgcatatgcaggcttgatttcttctctcttgcattcagctcaagcttctctgataaaaaccgacactgatgacagacacatccaacaatctcaatattactagtagtttagtaccaccacttggcggccctctttgatcgccgtactcatatactatatatattatactaaattggagcacgctgatcacgttctgcatcaaccgtaccaattaccaactccttaattggactttaaagcttgctactcagctgctctaagctcacaccgatccagtaatcgagctccagacatccatca

SEQ ID NO: 6490 - DNA, 2000 bp, Oryza sativa
tttaaaatgtaaaaaaatctagactggcctctcgcttaggtatggtggtcagcaagagcaatgcatgtcgatggaagaagcagtggcataggtgctggatgagacctgcacggaggcattctccttcctaatactataatagtagtatatgctaggcaaaatgccacgaaagctttcgaaaaattgaaccgtgaattttcggtgttataaaccaaaatcagaatttttggtgttttaccactaattttgcctgttatatataaagtgcttctcacggagtactacctccatcccaaaataagtgcaaccgtgaaaatccatgtctgatgtttgaccgtccatcttatttgaaaaatttataatttttttttaaaatagtcacacataaagtgctattcatgttttatcatctaataacaataaaaatactaatcataattgttttttccaataagacgaacgattaaccattgaatatgaacagtgtaaaactgcacttattttaggacgaagagagtatatttttaaatagatgtcgttttataaataaataaataaccaagatatactatgagtactcaaggtggtcgaagggacgtgggacccgggaagtagtttgcaggaatgaacaagtgacatctccataggaatttacaagtcagctgccgccgcccagctagcataatcttacaggtcaagggattgacatggttaggctcttttcttccggaaatggcctaaccatcgcatttaaaaacatactactacgtactaccatcaccaaaagttggaacgtaccgttgtttgatcctttgagaatcttgcgtacaataacgaaacacaggacatttctgaaggataaatgtccaccacttgaaatccaaaagcgaaagcaaacctacatttctgttcggaaggatttcccacacttcgcaaacaagtaaatccatttttttcggcaacaaaatgaactgtcttacagcgatacagcgatactagtattctataagaaactgaaacatcaaaattggtggttgctgcgcctgctggtgccagatgttatgtggagaaatttcaccgagtatcaacgactattcagatagccaacaagttgaccttgaccacatgcctgcgcctttgaccttcctgtgagatgaacacgtttttgttttgttttgtttttttgctgtttgtgctagcagggttcgtcaggagcatccgaagttaactgtctggaagtgctaattttagctgataataagatttcttcttcttagacttggatatctatccatcagttcatttaccttttggatttcttcaactctttgggcgtctccagcttctagttacttcgtctccttacacctcttgcagaaaactcacattcgaaagtgtcttaagatttgacgaagtcactaagaatatcgtgctgtaaataaatatattttctatcactaatacaagaataattagcacatgtcaaatcctagagttgaacccgggtgacctggtttcaccaaaataaaaaataaaaaaactattacaatccttctctttttgggtattggagcaatcgagacagaggaggccttggctggaaatagagggggggtatctcggcccggcccggcccaactgcgggaatctgggaggtgggtgggccccacggcggagactccgaaacccgcaagcaaccaaccacccaccaacccgggtggttcgtgtcgtggcattcatggctggccgcggccgctgcctctactagactaccactgmtgccgccctggactccacgagacgtgccccactcgacaacccaaaccccaacccccgctacgtctcctctcccccttttttattcccactccaccccccctttycccccytcccctcctcgtgctccgctttctccccccaaattcctcgccgccctcggtcgtcgccgccgcctccgccgcctcgcctcccggagattcgccgccttcgccgccgccgcc

SEQ ID NO: 6491 - DNA, 1586 bp, Oryza sativa
  misc_feature (1)...(1586): n = A,T,C or G
taagcgctaaatgggctnargctgggcccaaacgggattccsctgaaatgsggcccstataaaatgggcccgaatgggattkggacctacgtgaggcccactggagtgtaaagtgtgggtgggccgtactggagatccggagccgagttgcacttgcacgggctgtcacctgtttacgtcagcgagactgcgagagcatacgcaaggctcgcctgagccgtccgatcctatctgcgcggcggarattgaaacagctcagagacgctcgtggcggccgtcggtgaggtcgccggsgactacatggatgcctccggtcggatcgatctcctttccggcagagatgcacaaatacgtcgatytaccgtttacgrgctattctcacctcgctcatatcagacttgttggatcgattccccgtttttttttttttggtgttcctttgtggtttattgctgctgctgttttttcgtgtcagcaagcacgcgtcggtttgtcagttacctacttctctctccaggagtccagcttgttcctcgcatgacgatcgaggagaggagcaatctctccaggctgggctaggctagctagaggctgcatgagatatgtacatgtcgacgacatgcatgtcgtgtactgttgactcctgcttctccgttccgcttagtggtgcctgaccacaggtagtgaggtagagggtagagatagacttcaagtgctcacgcatttcccctgtcccgttttgagtgataattaagcttaagctggactgatggatagaagcagtaactggcttcatgaaccaaggattaatctagtaaaacggtaacgtacgccagatttgatcatgagcaacagtgggaaaaaagtgaaaaagaaatttcagaaaaagctagcaaagcatttttattctagctagctcgctacacgagaaaaagctagttcattctgttttttcagaaactattatgtgtctttctcctgaaagcaatgacaagtaaagcttatgggtgtgatatagtaccacgcaacatatcatatatagatgcacaagctaacgggttgacagaaatataccatgcaggcaaaataagccaaattaaagaatgcttcttaatccatcgcatgacatggcctcgccggcagcacatattttccatctgaataaaggtttatctcatcctgtcatatgtatagcttgaagttttgtacaagatgcacgcacaaactagcttccacatcgcacacatagagcactaaatggtaaaaaggaaaaaaaggcagaaactaaaatgggaagataagtccaaaaggccacctcagcgatatctccacctgacaagtgatgattcatacgacccaaacccccaagacaaccagttataaatgtcagagactgtaccaagtaggaatgtaattaagatcatatctcctagatggctgataagttaaaacaggctatatatgcttctcttccctgagaaaagaaccagaccacacatctagctagctaggtagcccacctcaacatcggcttacttgttttggagtagatgtttcagattagaagcaacatagagatttgagat

SEQ ID NO: 6492 - DNA, 2000 bp, Oryza sativa
caggtacgtagctagtattaccagcttgacacaaagcataaggccttttgcaagggaaaaatcaaaacttcccgattgcacaaaaaaaggtcaacaaaacgcacggcctctacgtgatcggtaaagatgaggtttttttgaagtttacaaacttggacttgtgcatggatatgcataagctagggagcagctttgtttgaatgctgttggatttatatacagcctacacggtcgtagccatgttccacgcatgtgagcgtgtgtgtccatgtgcggcgtctccgtccatccaatctttctcctagttgcatatgcttcagagggacatgagcccacagggcaaggttttgcccatttcacaccctatccaccttaaaacttgcgcctgataatcattgaacgcctgaagaagccagtaatctaaagtttatataatactagcctccttagtactaattgctttacctgtccatctgaccatctccccttagcttgagaaggattattccttccgtgtgtggggttagcttaaccttcatctggcgatctgatgtagtgatgtgcgtttgtgccccgacaataacacgctttaatctgttatgtgtattattcgacggcccagtgtgctctttgtagggctaatcgactcatccgatctgaattaacggttgttgacactggcagagcattcagggcttcaggccgtccagtgtccgctccatccaagggaccgagagcttctgtcatcagctaacgctaaatttagtttcagaagttgagtttggagtagaattctggcgctgcctaaacctagttttacctctctagtttattttgtgagagcgtttcacctttgcttcgctctcatttcacatagagttggagttgtgccaaacagaccctaaacccacctcacgcgaccatattcgaaaaaatatactccctccgtctcataatataagaaattttgagtttttgcttgcactgtttgaccactcgttttattcaaaaaattttgaaattattattattatttgtgacttactttattatctaaagtactataaacataacttttttaaaattttttttaaataagacgagtgatcaaacaaagaaaaaaaatcaaaatctagcaagtagaaacggcaaccagattatcagagatggccgggtcacccacagccacatatgggcaccagtaacactacaacacaagcagttagcattaaacgatgccaccgagttggaatcgacatgcacgtgcacgcgcccccagcggatgccgatcacatcgttatcaggcaaggcaacagcatatcacgtcgcgtgggcgtggtggtagcagcagcagtactcgcccaccggacaccaccccatgccgcgcggccgtgcggcgccccgcgcgcgcgcgacaccacccgagccgatcgatcgttcgagccgcgcgcccaagcgcaccgcgcaccgcgcagcggcgcgggcgcccatctgcttatggtccacacgcgccgcggcgccatttgcaggcttgcagcgcatggttcccgtctgcggctagcgagagccatgtgggcgggccccsgcacgcgcgccacttcaccaagcagttggtggctctgttacgtactacatgcgcgcgcgcgcgcgcgcaccgsggacgcgccggtgcggggaggacactcgcatgtgcgcctgatttgtatgtattaactgccggtggccaccgtggccggccgtggtcactcgcaacagagctggctggctactactcctaccagttatacgagtagctttttaactttctctcaccaaatcggggggaaggaaaagatgtgcacggctccgagacgagagtatccaaccgccaccggcactagcttggcttttggcttgctggctataaataccttaggcctggaagggccaacctcttcacactgccaagctccgcttcaagtgagctagtctagccagcgtttagacaccatcaccagcca

SEQ ID NO: 6493 - DNA, 2000 bp, Oryza sativa
gcgggccgggcagcaccaggcggaagcaggagccgcctgccggcaccgggatgtagtcgagccgtgcctggttggcgcggcacaactcgcgggcgatatacaggcccaagccggtgccgtgctcggaggtggtgaagaacggacggaacagctgtgcggccacgctctcgggaatgccggggccacggtccatcacgtcgatcaccgcgctgcgttcgtgttgtgccacgcgcaggcgcacccgcgccggctgctggccgatgcggccgtacttcaatgcgttgtgcaccagcacggtgagcacctggtacaggtgcttggtatcgacctgcgccatcaccgccgtgtcgctgatgatcggttcgatgctgtcggtctccagcgtctggccctgcttgtactccagcacgaagcggcgcacgaaggcgaccaggtccacgttctcgggcgtggcgcgttcgcgccgtgccagccccagcacgctctcgacgatgccgttggtgcgctggcattgctggcggatgatctgcagcaggcggcggtcgctttcgttgaaaccggtgccttcctccagcagctgcacggcgtagttgatcgccgccagcgggttgcggatttcatgggcgaggctggccgagaagcggcccattgccgacagggtgagcgattcggcgcgccgggagaccacgctggagtcgtccaggaacaccagggccagctcgctgccggccagcaggcgggcgaagcgcggttgcacttccggctggtcggggttgagctgcagcggcagttcgtcctgcgcccagccgttgcgccagcgctgcaggcggcgcgccakttccggcgcggcgctggccagatccaggcgtcctgtctcaccgatgccgtcgttgtcaccgagcagcatcgaggccgcttcattggccagggtgatgcggttgtcggcgtccaccaccagcacgccggtgcgcatgcggcggatgatcagttcgttgatctggaacaggttggccacttcgtcgccgcgctggttggccagctgctggttgcggcgcgcgcggttgcccacctggtagctgatgaaggccagcgccagggtagctggtggcgaacatggccagctcggccagggtgcgggtggggtcgccgccttcgagcaccttccagaggtattccgtaccggtggccaggctggcagcgattgccaggcccaggccccagctcagcggcagcagggtggcggccgcggcgatgttgaacagcagcgacatcgagatgccggcgctggcgccgggcagggcatgcgccagcagggtggcggcgatgatgtccaccagcacgctgctgaccacgatcgggcgcagccagcgttcgttgcggccgatcgccagggccagcagcgacagcagcagatagatggccgcgacggtatcggccaggtgcgggtgatgggcctcgccgaccatgccggacagggggctgtagagcaggccggcgatgaccgcggcgatcagcacccggtacagcgcgaagaagtacagctcacgccgcggaatcgattcgatgcggtcgatcaatgaagcactgggtgacacgccggaactccccttctggctgcctgggtctggaatctgcggcggccctgcctggcatcccctgaagccgggcgggtacgtcgcttctctgtggcctgcggtggaagcagccgggcgggcccgacactacacaccttggttgaccagtatagggcccccggcaggacgccgccggagccgcccggatcgcgcatttggcccgccggggataccggtggccaacggcggcccgggcgcaactgcctgaatgacggtggaaatctggccgggtctggcgttttgtacagacttctttgcgccccggcgctggctcggccacaatagtgggcccgccgcggtccatgccggsgccccgccggggccctgaggaattgcgtgcggtcgttcctattcccacggtgacgc

SEQ ID NO: 6494 - DNA, 2000 bp, Oryza sativa
ccagggacttaactttagtccctgtctttagacactaatttagagtattaaatatagactacttacaaaactaattacataaataaaagctaattcacgagacaaattttttaagcctaattaatctataattagagaatgtttactgtagcatcacataggctaatcatggattaattaggctcattagattcgtctcgcaaattagtccaagattatggatgggttttattaatagtctacgtttaatatttataattaattttcaaacatttgatgtgataaggacttaaaagttttagtctcatctaaacagggccttagtccctccaaccaaacaccacctaaagacaaaagaagtgacacgtgcagagtgagggaagctggccagaaatccagaaatgatcgtgagggcagttgcgtaattagacgagagaaagtaagcgttctcctcgtgccacgtttcccctggcccctcctgcatagtggggaaacgcgtgtccccaactagcagcagcagcaaacgcaatcacctgagaatataccgcacctcctcactgacccgtggggccatcgtagatctggccccacgtgtcactgaccagcaggctacgtggaggaggcacacgtggacgttatccgcttccggtttccgacgccaggcgtgagcctcgctgacgtgcccgtcccagcagcagtgccgtccagagcagatcagscacatgcaatgcagcmaaatgttggagtacgaagtactatccattgcacttttttttagaggagggtatttttaatcggtcgctatatcaaaccgatatataccgcctttatccattgcacttttatctaacacaatttaaccatttaaaaaaattatcaatggtcaaagtcgaagcaacgtcgggccaacagtgagtcagccacaactgacaagtgtattatgtagctaattctcaaattttaaatttgattttaagtgtaaaaataatccttcatcaataactttgttccattattttttactagtattttcctaactttgttccattattttttactagtattttcctatgattaataggaaaaaagtaaagatgcacgtaaatttttctcaaatatcaaaattcaaatcaagattaaattacaattagaaaatgagcaaagtacacaggtgcctatatctaaacttgtataagtgtgtcatctagatcgctaaattcttaaaatgtaatatgcaagtctccaaactttgtctaatgagtgtcatggagatcaaaatgctgtctaacccgctctgtatatgccacggtggcgcatacgtgttagccagacctctatattagtcacatagaaaaaataaaaaaaaacatcttctctatgcacgtttttttccatagcctcgtagacctccattattatccaccacgaggataacaaagtgatcaactcattggccacaggcaaaagcagcctaacctttgcaaaaccggattcggacaccaaagcgaagccgcctacactacaggggcaattccgtccaatccaaaacccgatccacaaacgagaaaaccgcgcggggccccaccgccccgaaccgtctcgaacccccccacccccgccctaaggcctaacgccgtcagtgacacaccccctactcaaattaccgaaacacccctccatccccgccttgccgtccsatccgcctcgagattcgcaaacgcttcccaatactccctccacccgccgttatatattgacgcctcacgcgaacggcgggaaagcgtaacagaacaaactaacttcttctcgagagaggaaaaaaaaaaagraaaaccmagaagaagtcgaggagaagagaggaagagtaaagcagcgcgaggaaggaaggcgagtctgctttgcgggattcgcccgtagtagagtttgattccgccgggttggtttggtggtttgatcgggggaggaggaggaggaggatggtggtgcgggagccggtggcg

SEQ ID NO: 6495 - DNA, 1834 bp, Oryza sativa
  misc_feature (1)...(1834): n = A,T,C or G
ccrtggagatggagatggcgcgcrcgcgtacagagagagtgcgcrtcacacgcgctcttgctatatatctncwctmcatcatcwcgagawcttgtatgtgtgtmtcccccgtrycngtgcgcgcgkgctcggatatttctctcgagccacastatctctctctctctctctatcgtgcacgtgtatrtgtgtrtgkcgmccctctcacatmcccctctcatatatatatatatatgtttacgtagtatcctaatcagcacctaaatcaacaaaattagtcatgtaatgtccttttgactttaattcacacgcgcaagataagtttatggtaccaaaatgartattttacaagttcatacactagattggcacccacttgatatattcgtgtaatgctgatacaatttactctactattataaatatagtttttratatttatacaaatttttaaataaaacgaacagtcaaatctatttccaacattcaatggtcttgtacattaaaaatctaagggagtagtttatactagcctgaagatggtgaagattgaaggcttgggattttattcttaagacaaaaagaagaataaaagagaatgcttactgttgagctgcgtgtaggggctgtcaaaaaataaaataagaagtaatttttacagaactataggtattttgatccatttattataaaagtaaatatttaagaacgtgtatcaaaaaacaacatatttaacatcatttttttttcacaaaactacatatttaaaatatcatatgaaaaaactatagatttatatcagttttatcacagaactacaacttttataaccttgacagtactatgatatcaactctaaaatttgtagttatttgataacttcatcactaaatctgtagttttgtgatacgatattttaaatatgtagttttgtgatacgatattttaaatctgtagctttgtgctacatattttttaaatatgtaggaataggagtaatagtttagtcaaaatatattttgcaaattttgtcaatagaaaaagaagctcgacactcgcgagctacacgagtagatctcgcgctaggcttggttcgggcccggcccgatatccaaacgacccgagctcgaatactaggctcgagtctgcaccgagctccacctcgaactcctgagctcgggctcgctgtcagttgcgtgtacttggtgtttgggtggcagtagcattattccggcttgacctgctgcgccgccggagttgagtagactctgctactacttgcttcaccggctcaccgcaacagcacccagaaaaaaaaaaaagctctcctcgttcgtctcctcctcctccccttctmattcccaaaatccaccaaatcccggcagcaaggcgcgatctctggcgcttccgcggttcgcgcgatccccgatcggtccgcgccaggttcgttgctgcagcttttgacgctcaaattacagggaaaagatctcacatcttttgctgatgacgaattgtgcggcttggcttctgcaggggcgctggtttcatggattggagttgctgggacggctcttcgtgggaaccctcgtgctgacctgattcgtttgggcgtggttgatttgggtcttagtttttggtggactttgagtccctttgcgggtggttcttgtttgtaggctgtgattggggaatcctgggaggttgtaggaatgggattatctagattgctgtaaatagaggtgaagacaattcttttaggtactaatttggtgcacataaggtgagaattttggttaggactaggtggagatcaggattattgttagggaagggg

SEQ ID NO: 6496 - DNA, 90 bp, Oryza sativa
wgggkgsswrgaaatccaccaggaaggcctktcctaccagatgytggcccatgaccgcggttttaccttcgtgtacggggbcatgacggc

SEQ ID NO: 6497 - DNA, 2000 bp, Oryza sativa
ggaggaagaggaggaggcgtccccggcggccggcggcggccggtggctccgctgccgcgccgcggaacggaggtggcgggaagggagcatggttggctggcgccttcaaagttcaaactccgtaggaaacagcatctgtgtcaccgattcttgatggcggtggcgcaaaacgaggctggcggcggcggcggcggcgatggggcgtggaggccggagcagaggcagagctcgcgcgacgcgagacggcgagaggcggcgaccggcagtggggcggagaagaggttgggctgctaggcccaactcgcggagtggcccgactgttgtcgtattttgttgtgtgggcttcgaaggaattttgcagggcccaggtcggaaagaatatatacgggtgaactttttttttccaaagacaggcgagaaaaagaaactctcgtaacacgcgcgcaccttattcttacgagcgactttgaatgtatcatgtagagtactcactaaaattcagaccatctttgagatctgtttgtactaacgagtattctcagccctagccggattacttaatttctatccaatcgtgatccggggttactaataaattctaacagagggtgagatcyattttttttttaataatggaagtataacgtcctgggcctctgctcaggagagttacagtttattgttacaatctaacactctaaaatgagtttagttcaaataagaaaaaaaaaacmaccacacaaatgactaaaaattaaccagatataagawataagggagaacacattattgaagtctatttgtgaatctccatctataattggcaaaagttgcataaccgttgtctcaagcttacgacgtgcaacttttaagaactcttcgagttcatcacacctttgtagttgtgcccaaaaccagagcaaatatgttgccctgaaaattatctgcatatataaaatagatgatgatttgtcagaaaccatatcattcctactcaaccacaaagcccaacatattgcataagctcccactaatataagtttactctttttattgttcaccccaacagccgcccataaaaaatatgagatatgctaataggaaggtataaaagataactgaactgctctccatataaactttgcataatgacaatccataaaaagatgttgaattatctcattttccatacagaaaacaacatcaaaataaagtgctaaaataaattacttcaaatcaatgaatcatgatttacaacaaaatacctcaactggtcacattagtgttgtacatgacttcagttccatcgttttgcccataagccgttatgcttattggcgggaaaaaaatgtgcataaaactttttatatttgtgttttagaaattaaattaaaataaagaaacattaaaatcaactaactgtaaaattttgaattttgattgtgactagtaagttgaaacgcaaaagatgactcatggttgacatggtggacattcaccaaacatattaccccttggtttttcttttggtccgagcataaagtatatggtggttttcgagttaatttaatttcaaaaccttttaagaaaacataattttaaatttacaattcaatccagtgttctctattttcttagcaaggatttttcattcaaaataaatacatcgacaacgatttcgatggattgttgtgaagtatcaggcaaagatttcatcagaatataccccgacaatgacatcagaaacagcatcttccacaagcacagtatcttcctgctactttagatcttttttttttcagaaaaaatgcatcaaaaactcaaacctgtggcccaaaaatgtgacaaaaaaagttttcaaaaagaaaagaaaagggaaaacatcatcatgacaaaaatatctctttttgtcgagggcccaaaaggcccaaatcctccatccacacatccacatcgcttccgagttcacacacgttgcgctcgccgccgcttcgacggag

SEQ ID NO: 6498 - DNA, 2000 bp, Oryza sativa
attactaatcgctaatcagtccgtcctaaagacagcgagatctttccacgctaagcacatctcagccgtccacgtgtcgggaccacgtcgcacggatggcgtccagcgcacggcgaggggtaaaatgggtagctttcaaacacgggagagcgttccagcgcggaccgtggagtgggcgggggatttcccgccactcgctcacgaactgaagcttacagcatagccccttcaaatcaagataattacaaatggcccctctagctctccgaggccagcacatgatacacaacttaattattaaactgatgccattgagaatttcagatggaaggctctgttaatcttttgctccttttcagttcgaatctagtaaagtttaagtagtatagaagataccactactccgtatcagtgcttttgccggtggaagttgataagaaatattttgacggcctgcatttcttgcctacttcaagttggtactacataagtttttcaggaaaaagaagttggtcctacgtatgcaggttggaacattttcattttatatgacatctagtgacataataatccattacaagattattaaaatattaaataattatgcatccgttccgaaaccaaactttcttcatggtcataacaaaactttgaatcgcaattctttgtgtttgttctagtgcagttcattttaggccatttgtatattgatgcacgtgaatggtgtttttctctacaaattattttttcatacactgattcgtttattctataacatctatttcccctttttttatttgaataaatattaaactccacaagttgtgtgttttgagcaccattcctgtctggcatgtgacatttttacataatcaataaaatcttgaatctcaaaggaaaaaaaattacatgtaagatgatatcagatgttcatattggtaccatgtcaacatagatactgtaatattgtaatttttcgtttttctggttacgacttatcagggttgtatcaatatgaacttcgcactatgttacgtgagtcgttaaaaaaaacttagatgttgtacacttaacaatcgaaaattcaacatggtgttttagtgaagggtatttcaactagtttgagagttttttttttggttaagagtgttctagacttacgggttacggttttttttgttagagtggcttatctaaccatcactgttttctcttatgactgtggattaccgacgtgcacgttttccaaacctctaaatgggaagagtatcactttctatataaaatgttttacaataccttttttaaaacaacatttaacttgctatattcaattcattcttttgtaccattgaatatgaacaaaacaaaagttgaagaccaagaagtggtcatattcattttcaaataaatgaaaatgtcacagaaaaggtggaaaaccacaaattcctttaatgcttgtactattgtctttcatattttaaaacagtactatctccaaaattacaaaacttcaatggactcaaaagaccccccaagtcaacaataagtaatttagacaaaacacaaggtcggtagaccagaaatttcctcgaaaaaggcaaaagccaaatatttgaaataaaawtgcaaagtagtagttggggatttaatagtggcttacaataataattaatctctcgkctctctctctccgctcccccgcctcgaaacctccctctctcgcctgtcgccggccactcgccggctccggccgccgtgattcggcggggcctgcgccttgcctaggcctccacgttcccctccggtgccacctcacccgctggggtatggctcattgacgtggcggcccgggggacgtgacgcgacccagttggaattcgaaatcaccgccggagatgatgatgagctcgtcgacctcgaggagggaggcggcggcgaagagctccgagctggggcgcgccggcggcgtggatcccccgaggccctccgcggcggcg

SEQ ID NO: 6499 - DNA, 2000 bp, Oryza sativa
  misc_feature (1)...(2000): n = A,T,C or G
aacttctttttcctgaaaaacttatgtagtaccaacttgaagtaggcaagaaatgcaggccgtcaaaatatttcttatcaacttccaccggcaaaagcactgatacggagtagtggtatcttctatactacttaaactttactagattcgaactgaaaaggagcaaaagattaacagagccttccatctgaaattctcaatggcatcagtttaataattaagttgtgtatcatgtgctggcctcggagagctagaggggccatttgtaattatcttgatttgaaggggctatgctgtaagcttcagttcgtgagcgagtggcgggaaatcccccgcccactccacggtccgcgctggaacgctctcccgtgtttgaaagctacccattttacccctcgccgtgcgctggacgccatccgtgcgacgtggtcccgacacgtggacggctgagatgtgcttagcgtggaaagatctcgctgtctttaggacggactgattagcgattagtaattgcgtgctcaaatactaattaacccacagaacgtatacatatttttatccagggacacgttgacttccatcttattctcgcgtttccatgtgatttctggaggattatcagaggctagctaggcgttattcagccagttcttaagtgtggaaattaatatgtgcagtgcagattctttttgtataattaaccatatgtttaagaacaactccatgtcacaatctttttgtaaagcatgtgtttgagaataactccatgtcacatatagggtataattagatcaagatgtatccaaattaatgagtaattatggacagcaaagctgacggatgaatgctggtagtgctcctgtcctacgtgcttgctggtctgcagctagcgaatctccagcagcagatgcacgcatccacaacgtggctggcaatcaaaaaactgtcacagctaattaaccagcatctgcagtttgctcataactcgtgttaatggctatgaagaaagaaaaaaaccgagcaactttcctctcggagtatcggtaatctttcgttacgttttcgtgtgatgagtagttctcgcaaacggttttaattggttaatggtcacctaaaatcaattaaattacgtgtgtatgctgcaagtaattaattggctagtggatggacaggacaacccaggaagcaatcaatcaagcagcaaagaacaatttagctcgtgtttagttactttccaatttttattaagtatacgaacacacatttaaagtattaaatatagactaataataaaataaattgcagattctgcctgcaaactatagaatgaatctattaaacctaattaatccattattaacaaatgtttactgtagcatcacattattaaatcatggcgcaattaggctcaaaagattcgtctcgcaatttacatgtaaactgtgtaattgttttttcgtccacatttagtgctccatgtatatatctaaacatttgatgtgacggaatttttagaagtttgatgggaactaaacacagcataattaagcmaaaaaaaaaagcmacaattwcccaatgatmcgataaggrgaccccacctactagtncaaagcagtcatgacattccmgaraattagtctcagcaaggcatattcttctcatcctctcatcaaataatatttgcagcagtttgctgatgcatattccatgccaacttaattgcagttccaggtgtcattagcccatttattacatttaacactgttgtgaacttatgatccaaatggcccatcagccgaagtgctcagatttaggcccaaacaaggaagaagcccagccgaagaaacatgggctcggcccaagccacgtcatacgagcacggatctcgaggtgggagaacgtacggacgcgatcccctccgagcggccgtaggctggccctcccgacccagcaaaatcttcttctcccgagacgaaccacccgaagccgcagcagcagcg

SEQ ID NO: 6500 - DNA, 2000 bp, Oryza sativa
atcttgataaaaactaaaacaaaaatattcctttacctcagcatcataacccttggcgttgagactcaatatctcagcaccaaatccatttagtgatgacacctctaacgtaaaacttaaaatggtactacacgcaactagataagcaagtgaatgtggtgcattggtaagtggtcttgttttgtcattaagatcatagtttgaatcgccactgtcgcatgattattatttttttttgacaagaggctgggagctattccgaagtgataaaaccaaactgagaaagtcatggcagtgaaaccgaagaggtggcgccaagatgttgggtgtcagtacccaggtccataaaactaaggtagaggttcgattttggttatagttttatcaagatctatttataaaaataagttttatcaaaacgtcaaagtgtcaaacttttcgatggtccgaagtataacaaagataaacatataccagtcaaaagtaaaagaatgagataaatctagtctaaaagaaaactaacgttaaaaaatctcgaattataattcatttttwatttatagtattaaagaatgttgcagtttatggcgactaaattaagatcagacagtccactcataaaaaaagagtcatgttcatcttgagccgtaaacttgaccaagttcattgcacctttgtgtagcagaaacggaaattaagatcagacagttcactcataacaaaaggagtcatgttcgtcttgagccggaaactcgtccaagttcaatgtacctttgtggagcagtggagcagaaacgggaatatcatacggagtacaaaacagtgaatatagatgaagatttgtttagcaggtgaaaatatgtcccagtctctaatgtatacacggtaagacgatggagccaaaatgtcacggtatcttgttgcgacacaggaatttgcgtaatggatcgaacaacccagataatgcactttctttttttcccccttagaaacacgctacaaacgctgagctcacaacaatgcatgctcactccatgaatacgcacaagcactctacccctgtaaacacttttaaaagattagactattacatcttaatattaatattaacgaagtcatcacatatttctagctatttaatggatgtaacatctacttctcaaagcatagtaattagtcgtaaatgccaacactgtaggtcaagtctaaaacttaaatctagataggctggttctactctaaaaaatcttagggcacgctcattttgatgtcattttaaatcatatcattattcggtaaaattaacaaatacgtataagtttattattagatactggtaatacttaggaagttttggtaacatcacatttagcctatcctaccaaaatttagcaatattattaaactaaaattttggtattactaaattttgaaaagagttcattttgatactaattgtaacaacataaacgatttttgtgtacgagaccttacaatttttataaacgggcaacaatttgccgcatttagaaaaattaagtagtattttcacatacggctacttaagacgctcatatgaaaaaaatcgatttttccatacgggctcttaactggtccgcatacaaaaataagctgtactattcgataatatttgattcctatttcatatccggatttctgattccaaaaaaaaaatataaaaaatatgatagagctagattccacccgtgattcgttttcatcctagcaaacctcgcaaaaccgtcattcgcgaaacgtcatgttgttgtgtacttattatccgtttggagggcagggccggagggcccgttggcacatactggtcctgtgggcttttaagcggcgtcgccggtggccacgcasgcacccaactttcacctactctgcttctgctgccctcctgcatcgactcaatcctcaattcccgtgtcgtcgtcgtcgtcgtcgtctgcttcgtcggccgccgcgcgccgcccgcg

SEQ ID NO: 6501 - DNA, 2000 bp, Oryza sativa
ttttacgtgcatggatttactttccttttttttcttttcgttacaaaaaaaatgcacgtaccagtaactagtgcgtctttttcattccgtcaaaatatgtcttcttctgaatgggattgtgccgtaacattgatttatcaatttataatgagttcaataggtatttttctaacatatgaatacgctattcaacattattattggaaataacatcgctacacgtattaattttttttwacataactcttagaaaagtcctgactgtttgatttaaattaatgggaattagagaaaattaatgtgctcataacatcacagtactagtaagagtttagaatgtatatccttttcctatgagcacacaatccaaaataggttgcacatgatatacctaatgccaatggagtatataccattgaaccaaattttggtgtacgcataaaagtctctattacttttgataatgatagccactaaagcaatactcccatgtcttaaattatacttctttcgtcttaaaataaatttaattttcacccatcccacacattaatactacagaactaaaaaaaattatagcactcccactttattaaatcccaatacaattatttatttctttatactctatactttcataaattccgatagaatgattacttaaaaataaatatattttgagatagatgtgagaagaaaaaatgagcttattatatgaacggagtaactacttataattataaatcgaaacatgtatatgtacggatttgtatgcaagagccaacctaactaaaatcctaaatccccctcttgatagtcagagcattcacaaacaaaactcaaacccatcactaaaataaccttagttttatttttttttcaaaaaaaaaattcacacaactgatgtacctaacggttgacagagttaccgtaccccccacaaactggatctacacgcagcaaccgccatctcacctcggccccacccatactacccactcattgccacgtgggcgcccgcctctgggcccacccaagcgccctgtgcccccatgcgccagcgaggcttgctgcgtcgtcttcagccgtacttttatacctccaaaatcatttatagaaatcatttataggagtactccttccatgattccataaaaaaaaagacaatataatattagaggtgacattttctgatacaacaaatttggacaagctttcatctagaatcattgtaataggaaatatcacatccattactatagaatgccttttttcgagacggagggggtatattttaagatgaagaaaatatatgagaagcattgaaaaaatatgcaaaataagataaactattagtgcctaattaattaaatattaattattataaattttaaaaagaattaatttaactttttatattttttaaaatacatcagtcagcagtttgagatgcgtactagcgaaaacgacgttctttttcttctcttcaactctcaaacgcagcccccaccaccgctgacgccatcacgtcgtcagtgataacggcgacggcggaagcgaacaaggcgacaccctttctgtgccccgttttgtcgtctttggaagcgacgccgccgtagagagagaaactagagagagagtgtagtgtgtgagttggtccaggccagcacgcaacaaagcaatcaaatactactacgcgatatgagagagagggatgcgtcgtcgccattagcggggagaggagcgggagagagctcgtcgggattattccgagctccatatccattgaaccgaaccagctctgagtgagagagagagagagagatcggagctgttgtttcttctcgtttctttgattggtggcggtgttgaattgaattgaattgatcgatcgattgtttcttggtgtggtggtggcggcgacggcgagcagcgcgccaaggtacatgacctcggcggcgccggcggccgcgcagttcgctgcgccggctccggcggcw

SEQ ID NO: 6502 - DNA, 1932 bp, Oryza sativa
tttttttacccgggggcacttagggcttatcatttgcatttacgtgtagcaattggcagttatcttaactgcaagagggggaaaaaaggttagcacaaatcttttagccgtcatgctattgccatgtagtggtatgaactgtttgtgatttatatcacccttgttatttaaccccaagaaatgatctggatggtagactcattccaaaagaaattattcaaggtgagatgatataggtagttctgggacaacatctctgggtagcccttaaagttcatatcatatcaagagcatgaagttataagagtagttcttctcatctgactgatgtgtgatatggtgacgattgagtttttgcttgtggtctcacaattatgggcaattttagggaagtaggcaggtgatgttgtctccgggacaatttaatttcccggatataattcatggcacattgaattcaataattcaagtagtaccttcttgtggtatgaccttggtccagttaggtgtgctctcaggatacagctcacagccacaccgaatggtagtatttttttttattttttagataatggaagctttattgaactcagtcaatagtatatcaggcatagttgttgtcctgtgagagactgtaatggagcatgcaaatagaatggacttttggacaaacactgatcaagttaatgataatgccagttgcattcaggacagtatttccgctgtaggatggatgcaatttggatagattaagtttcctttggtcacgttgctcgtctttggtctatgctaatatgttttaggatagatttcactgggtaggtattgaagtttctataagctggttccattgacttaattgcaagttctgtatgccaggtaacactggtagatacattttggtatcaaaggtaacattatactatagttatatgcctatatttatgattggctagaacttagaaggggaaatgattagattgcatgttgtttgtgtcatgctaatggaaggtggtggtccttgaattcgtacttttgtgttattttggtaggagagtgtggttcaatgttcttaaatgatgtttggagtggatatttgtggtcctaaacaagaagtagatgtgcttcattttggatctttggagagctcattgtcatgaaaaaaaaaatgagatgtttccatttacagtgaaagaacagtttacatgtcggcacatcttttcccctggagcaaataagccatttgacacaataagtaaattgtgattagcagtctctttattctttatcacctatacatccagtggagaattttgttccatgtgctctcttgtgggaactaattttattttggtgttcaaacataaattccctgaaaattgactaggcagttttgtgagcttccatgcaactattgagaatggatagcagttatgtataaagttagtttttcaacttagataaattgacctgcacaactggcagtgtgctctaggctctaacatactacatagatttttttttgaaaggatactacatagattttttatccttcaaaatccaaaattcgacttaaaaatacatcttaagaagcttttatggttatgtttgccttgtaacactcaatggttccagctttgttgtaattaggatccaccatattgaggcttgtttttaaaaaggaattcttttttggtctctgttttgatagtctatatcacgtgtcatagttttgtgatatataattaatattttagttaaccaaataatttacatagaaatgagcttactagtgtttctgcgttcgataaaataactatggcttcatcataatatttttgtaatttaatgcccctgctagaacatgtatttatttcaaaggactaaaatgtattctttgatgttttctttgttgcaaaaggttgtggaatc

SEQ ID NO: 6503 - DNA, 2000 bp, Oryza sativa
tacctcaatgtaccacatgagatactaagttttgcaataaaaaatatgatatctcccgaggatagtaatatacagagatacaaatttgctttttgtatagatagaaaaattaatatagatataatatagataagaaaatactactagaaaaatcttttttccagtaggccaaaaatagtattttcaagtggaggaaaggaccgcctgaaagcaaaggcatgcgaatatagatgattttcgtaaatccgtcgccaccaccccaacccactggcctccccctccggccgatggctctcctcctccatcagccgctgttgcccgaggggagcgccgccgccgctgtcggctcccctcttccgtccagatctgggaggggaagggaagggcagcaacacggtgatgctctagaggcagcgacctcccctcccctcagctcctcgtcgccgccgcctcccctcccctctccggatccaggcggcggcagtgtggacacagtcggtggcgggacccaagcgattgtgtcggtgtcgcggccggtggcggagggagagtagagctgagggagaggagagggaggggagctgcacctccctttccggccacgctgccgccgacacccctccccttcaccggcgctgccgcctcacctcctcgtcgccgccgcctcccctcccctycccgtgaccgggcggcagcggattcaagcagcgtcatcgttgtcatcgcagatggcagcgagacccaggcgtcgacgccgttgtcatcctgtggtagtcgtcatcgtcgcagccggcggcagaggagagtattgttgagggagaggagagggaggggagccgcacctcccctccggacgcgccaccaccaccgccctctgctcgcgccaccgccgacgcccctccccttcaccggtgccaccaccaacccctctgcctgcgctgccactggcgcccctcccctcctctggatctgagaggggagggaaggaaagggaagggagggagccaaagggaaataagagtgagagagaaggggagggtgaggtggacaggagaagataaggataggactagattttttttcctgtagacatgatttttacaggtagaccacataattagattccgcctgcaaaaattaatttttttaggcagatctcttaagtgatccgtctggaaaaattgattttcacagacggacggcgagctttacgccggtttatattttcgtacgcggccatttggcttcgaaagtcatacccgtctaggaaaaaaactcacgtatgagaaaatgctttttctagtagtgaaaataagcatatagatatatatattaatttttatagttaaatgtagccaaattcgccggcttctccattgtctcgccgatccggccggaaaaacggacaacgaattaccctcactctcgtgttctccgctgagtgggcttggtttccctggagctagcgctatctagctctcatgatagtgctgcaagtttaccactaacatgaaaaatatgcattaacagttttaggttaaaaacgaaaattatcatgcataaatagtattgcgttctgtagttctcccgtcagtatatattcaaggaaaaacgaaattataagcataaggtattttaaatcatttcattgaaaaatattgtgaaaccaagaagttttccttgaccaaaaatcgtagaatatcattctggcttgccaaatggcaaccaatcgaatccgatgatctgcttgtgcgtgtcaatgacttccaccagtggaatttccttctctctctctctctttttttttttgcgaattattatttttaattttctggaagcaaaagcaaaccacataacacgccctctgattatgactcgattcaattagcagcaacgactaatgacttccatttccaaactaattataaatatagccacaaataacagcatgttcttcaataagcaaaccaatgatctactaagcatctaaccactacaag

SEQ ID NO: 6504 - DNA, 2000 bp, Oryza sativa
tccttgatctgcaggccgtagtagtcggcaacggttttctggatgttgggaatgctgatcgcctgctgctgggcgcgcagcaggtcgcgcagggtttcctgagcgaattcggtggtgatcgcgcggccggtgaagttggcgcgggcggtcagggtattgagcgcgccctcgaggtcgcgcacgttggagcgcatcttcttggcgatcaggaacgcaacatcatcgggaatctcggcaccgcgttcgcgcgccttggccagcacgatcgcggcgcgggtctcgaagtccggcggttcgatcgcgaccgacaggccccaggcaagccgcgacttcaggcgcgcttccaggccttcgacctcgcgcggatagcggtcacaggtcaggatgatctgttgcttgccatcgaacaacgcgttgaaggtktggaagaactcttcctgcgtgcggtccttgccggcgaagaactggatgtcatcgatcaacagcgcgtccacctgctggaactggcgcttgaactgatccatggtcttttcctgcagggcccggatcatggcgctgaagaactgttccgaacgcaggtacagcaccttcgcgactggattggcctggcgcatcgcgttgccggcggcgaacatcaggtgggtcttgcccaggccggtgcctccgtacagcagcagcgggttgtgggcccggtcgcccggcttctgcgctgcctggaaggcagcggccaggcccagctggttactgcgcccttcgacgaagttggcgaaggtgtagtgattgtccagattgccggcaaacggcacctgcggttcgctggacacaggcgccgacgacgtggaaaccggcgcgttctgcgcctccacggggcgcgggcgcaaccgatttcaagaaaaacgtcgctgaaaccggcgaagtgagccagcagttcgcggatccgggccaggtacagctcgcggacctggtcgacgatgaaggcattcggtgcatacagcaccaggctgtccacgcgcagatcggcctgcagcggcttcaaccaggtatgaacgtcttccggcgggaactccgcttcgaggcgctcgagactacgggaccaggcatccatcagcaataatcgtccggtggccggggcatggacgcgacaaggcgcccaaacacaggccggaaaggggggaaatggatggctcagactaccaccgagcgcccgccttcggaatgcttgtcccctacttattcacaaaaacatccacagctattgcacagcccggtgaattcgcgtagtccccaggggttgacgtgaggggggagacctctctagaatttccggttctttccgtcccattcatacgagaggcccccaatggccacgaagcgcacctaccagcccagcaacctcaagcgtaagcgcgaccacggcttccgtgcccgtatgaagaccgctgacggccgcaagatcctgtcgcgtcgccgcgccaagggccgcaaagtcctgagcgcctgattgccatgccgcaccctgcggcagacgcaatcccttcgacagtgaatactgcagacccgcgcaagcgattccctcgctctgcgcgggttcgcacgcgtgccgaatactcaacggtcttcaacggcgcccgccgtgtgtccgatccgctgatgaccctgcactggctgccggctgaccggccggccaggctgggtctggcggtttcccgcaaggtcgatccgaacgccgttgggcgtaaccggatcaagcgcgtcctgcgcgacatcctgcgtcagacacgtaccgatatccagccaggcgacttcgtcgtcgtggcccgtagtgctgcgcgttccgccagcaacgacgagatccgccaggccttcctgcgcctgctgcgtcgcctgcgtgcattgcccgcgccgggcgtggacggcacaatgccgccgcctgatggcatcgcaactccttctttgaccgagccggcatcgcgtcccggccccgccgagcctgtccgctg

SEQ ID NO: 6505 - DNA, 2000 bp, Oryza sativa
cgctaatagtcagatataaaattttatctatagatcatttataaatcatttttagttgcttcgttcatttttctaccacttatcaaccatagctcaaccgatcaattgacaataaaagttactaaacgacatcgctcatcacacacccaacgctcaccgatgggtgcctctcgaccacgagtttagcacttgtgcaacatatatgcgtgcgatgaacatctactgatgcgccatgcgaattttagcgttcgttcatgacgcttccaacggcacagaggctgagcagcagcatgcatgcatggctcttgtgaaaacaaaaaaggttactggtaaatgacatgctgctgtagctagctagcagaatgcaaggcccatgcatatgcaatgctatgcgacaagtacagtaccagcatgtatggtagccagctaactaatctatcagcagaggcagcaagctcgtgcatggtgtgatgcacttctctccagtaatctagtggtaattttcacccaaagcgttgctcatatggacagtaattagtaatattaccaaggttcacaatcccgttacctgaccaaatactactcacgaatggtatctctggttttcgttaaaaccgttggtaaaccagcaaaaatagacaaaatttgtcaaaattttaaattttagttttttttttttaacttagccgggaaaccttgaagtttgtgctgtcgagctgtcctgggaaggacggttttggttgggattgtgaaccctggttactgcacttcatttttgaacagatattagtgcaacagacaaatgccaacgcatttttttctgtttaccggcaagctgaagcttttacgatccccatacagccgttgctgcaaacctgccaagaaagagcagcagaaacaggtgtcattttgtggtggaaagccaagtaaagtaaacagaagatggaagatagtgaggaccagggagtgaggcaggggacacatggcccacgcctccctgcacattttcgtgtataaatacaggtggatgcatcgctctcccagcatccatcggttctctgctctgttcatccatagagtttcctcctcttctcctttagtgcaaggtagagaagagcatgtgtgtgtgtgtgtgtgtgtgaactgtgaagtgcagagtgcttctgtagttctgtgttatgtccatagtgatcttgttaggattgttgctatggatgcatgatgttatggttgatctctgaattacagtagggacttttctgagatctctggattagtggggggtgctaaatttttttctggttgcatcagcttgggtttctggtattggtgtgggttcttgctctgaattttggttcagaatgtcgatttgtttgtgtttgttctctgaagttgagagtagctatgatccatccagcacagaactgcaggtcctgcctgccggctgcatatacaggacatgccattttgcaagctctgggcttatggtttctcttttggagttcttcttcttgcatgatctgtgttctctaacaaaggaagcaagatttagcaactttattcagagacaagaaaaggatctggcaaccttttgtttctgttttatcctactcgtaaagattgttatttaagcaaaaatttcccaaaagttttaaatataatttccatgatgtgcactctcatgtccttgaacctggcactcattatgggctcctcagaagtgctgtagctaatgtcactaatmttttgtatctttgttcatagtcttgtattttatgatgcttatccctttgtgctttccatgtttgatgtccaaatgtcatggcaatgtttttgacttctagtaggggttttagtacctttttgttagataagtacatccaaattctgtttatttattcaaaaatcattctgtttattcactgaaaacatttgtccattcaatggactcataaactgtctgtgtttttcaggcttgaggatccatctagaagatagca

SEQ ID NO: 6506 - DNA, 2000 bp, Oryza sativa
gtaagaccgtttaagtttcttaattagtgacatcatgtaacatgaattttgatgtttcttaattaattaactggaagatcgagaacaccatgtactactagtaccattttaccaggcctgtttgaagttgaaggagcaggtcaactgacgagtagaaatgcctctgttcgttttcagtccttgagaaattcagactttcagagtaggaaacgcattgattacgcggccaaatgaaatacggcgcccctataaacgagggatgcatacagtagtacagtactcgggatctgattgcaccgtcaaaatcaaaatcaaagcagttgaattctactcggggttaaaactaagttgacgattcacggatttgtttaagcaggcatcgtggtcgccatgacgcatgagcctttgaccctgcaatgcaaccaccgttttgaacacaagaattttgcgtgtcactacggtttctcgtgaaaggctttgtgtaccgcgtaggattgctacactcgtcggctgtgaagaaacatgcatggtagagcaacactactcctagcatgtttgtggtagagctccaacttctaaatttagtttcaggagttgagtctagagtggagttgcggaactgtctaaagtctaaattcagcttcaactctttagtttattttgtaagagcactctacctaactccgctcttattttaggtagagatgaaactgtttggctgagcttcagttacagaagaggtggagctggagctcctgtgccaattgccaaacaggcccaataatctcatccagaatgttaatgtagagagtggagttgtgagtgcatgatttttgtttggaggagctttagattacgagaaacatgggtaggaattcaactggtgagaatatggagaagttgtaaaaaccaatttttctttcctagtttattttttattctacaatcacaacttctcataatctgaaaaaaaaaagtttatggagctttggattcaaaggagaaaacgcaacccaaaagttcctctaacagaaaagcccataaatattgtgcacacacgatacttcataggaatctagtgacatcaaggtacttcactcttcggttgtgttaggggggtggagtggtggacacaaacatatgtgtgcgcatatattttctgcgtaataaaaaaatctagtaataaagtttgggagtacctatgcatctttcgaaagatttttatgatcatatcacacagatttttaatctttagattaaaatctaatgggcacagtaaaatgcaaaaaagcaactaaaaaacaccataatggacactaaattaccatatcttcaagaaaaaaaccaaatctaatatatatttcaaaacttacatgcaaagattcaaaaattacactgtaacttacaaaagttacactgtaaatttcataaattacactataatttacaagaaaacacactgtaaatttgagtgagaaaatcaagtgagagataagaagaaatctttcgagtgagatatagcaaaatcgataaagttttgcattgaaaccaaacaatctcatgctccaatggaagggaactatggaagtcctatgtaaatgggccaaagcccaaagtaatacacaaaggcattccaaattcgggcctgcacaagtaaaccgggcgatccagaccgtccgatttggcgcgcagaaacccgatccgcatcccgcgccgtcgcctcaccgctatccctcatcacccactgacaagttgccccacacgggaggatggcccacacgtcagtgatagagggtccgttccagggggcccacctcatttggtcccaggaaggtccttcctcgctctcctctctgtcttcctccgatccacccaaccaaccaagcgcccgccggcctcgtcgcgcgccgcccctccaccgcccgtctccaatgccaccgccgccgcagccgcagccgccgccgccgtcgtccgcgtagggtaggggcatcccgccggcg

SEQ ID NO: 6507 - DNA, 2000 bp, Oryza sativa
tattttattttgtaacagtgggctgttacaaaaatatagcaacctaaaacatcgaagtattacgatgtatgtgtctcatctggttttagattgttatattttgtaagagatgtagtaaccaacatagagagattttatcaatttgctttttgaaaagggcaaaggctttgcctcttgtattactagtaatagagaaggagaacaaaagacagaatttcaaattattacgtccatctagctgaacaatcaaccagagtttgctaagcatgaacggcacaacgcagtggataaaagtacttttggagccatgtagggttgaagaaacaaagacgcaggcaattgttacttttctatcatttctaaccctatcaacttttagttgtacttgttgagggcaatgaacaaaacacccaaataccactatacgttgataaaaagtaattgtgaacataaaaggcgaccctcgcaaacaatgcgaatagatgcaccaaaacttatcttttgttttttgccaaagggacacaattttttttttaccaaaattaggtaaagctggaatttttgtcaaatcaataattcttcagattttggtagttttacctaggttttgacataactccatgaaaaatgttttggaattaacaacattttggttaattagtaatttgccacagaaccattgtactatgagccataataaataaaatgatactccgtcccgctaaaatattttgttttattaaaataagctgaacaacaattactgtactatattactagtatataatttatgtaacataaaattgatgttatttgattcatattcaaaagtatttacttatgtttttttctcacataaatgctttggaagatagggcttcatgtttgtcttcgttgggttaagccgtggtctagctgaacccaactctatcttgccaaaattttgataaacgaccaattttaaaaactatattaaaaatagagcatggttaaaatttattttagaaatggacgtagatctcaacgctagactaagatagtgttgtgattgaacatgtcagcaccggtttttctggtgctgaacccatgctagcgtggcacaacagacgagctagcgacctgacgtggcacgaggtaggtgccaggatcttggtgcttaccctctctgtcccataaaaaaaatcctagctacgaagctggacatatgcgtatccaggttcgtagctagggtttgtttttttagacagagtagtactatccaacattaacttcaatcccttttacgctccatgtgttggggccggccctaccgcccaactcctttctttttcctctccgctctaccaagtgacttctcactaccacctctctcctctactcccctaatatattcagaactacaaaaatcaaaggaattttctggggatttctcataaggtcgatttgcaacgtaatcgcttccaagtcctctttttttatataattctttatccatggagttaagatttagaatcggtaatctggtcaaaatcttgggttttaattttgcaaggcaatttggtgtttatatgtggttaaagttccaatttcttctagtagtcaagatatggaaattgatttgtaatcaaatttccccccagatatcagcacttggcaatgggcaaataccggtatacttttggttgatccgacccgacccgatatggcatcggccaatcaaatcccagtcttaaccatccccatcagtcaaactaatccccttctcttctcttctcctcacttcacttgaaattcctcatcttcttcctcctacgcgcttcctcccccgctctataagaaggctcgcctcgagctcacctctcaccactctccctctccttcctcctcctcctcgtcgcgaacacctggcgcgagcgattcttggcttcccaattttgcgacggcgatcgatctttgggttttcttggtgttcgatcgatcagagcagctgaggcgaggca

SEQ ID NO: 6508 - DNA, 2000 bp, Oryza sativa
attaaaatacattttataaataattaaaatttagaactaaaaaaataagaaatatggaagagaagactagagtccatgtagatatacaatttagaactaattaaaatttagaattaaaaataagagattaaaactagagtttagagtctatatacaaatataatttgtaaatatataaaattcaaaattaaaaataaataatattgtaagaagagtctagagttcatgtatataaaaaaaataaatggctaaaatttgaaacaaaaaagaaaatattaaaagatgggtttagagtccttaaagaaatatattttacaaatgaaataaaaaaaaagagtccatattaaaatacattttataaataattaaaatttagaaaaaaaaaagaaatatggaagagaatactagagtcgatgtagatatacaatttagaactaattaaaatttagaattaaaaataagagattaaaactagagtttagagtctatatacaaatataatttgtaaatatctaaaattcgaaattaaaaataaataatattgtaagaagagtctagagttcatatatataaaaaattaaaatagctaaaattcgaaaaaaaaagaaaatattaaaagatgggtttagagtccttaaagaaatatattttacaaatgattgaaattcgaaatgaaaaataaggaatattgaaagaaaagactagagtctaggtatgcaatttagaactaattaaaattctgagataataaaataaaaataaaagtagagtttagaatccataaaaaatacaattttttaaatactaaaactcaaaatttaaaagtaattaatattggaaaaagagtttagagtccatacagtaatataatttaggaatagctgaaattcaaaatttaaaaagtaaaaatattgaaaaaggggtttagagtccatatgtcagtgttacggtccaccttaggatttaggaacataaactgacacatcacaggtggccatcttaagctaatgggccagccgcccagctcgtttctatctgcaacataaggcagaaaaccaaggccttgacatttcttttaggacacacgggctggaacggccccggcccaattaattaaatcctgctattgaaaaagggttctgtaattagagttcctactactatacatacttccgcaaggtaatctagcacccaaatcaaactacagccaacgtgtatcatcagtagattccaccccaagatcgtgtgcccgctccgatcggcagaacctaatcacgaccaatccgtcgccaacacagccacaaacccacaattacgcggcggtgcattctcgttgctttgacggcttcgctaaacgaaagatatttaccgtggctaagcaagccctgatcacacgttccacacctcgcagcgccaccacatccgagccgatcgaccggcccaacccccccgtgagacagactccagaggccgcgagcggtggcatcgtcatcgcaatatcaaatccacatccacatctccatcgagcgatccacccacaacctgcaacggcgcgacccaaccgcaaagccgctcgcattgaaacccgcgtaggttgccttcgttttccgccccgcggcggcccatcatccgcgcgcgtgtggaccaggacgcgcgggcggggaaccgttggccacggcgccgcggcgcgttatcgcgagcctatccgcgcgcgtgtggcgcgctgggtgggtgaggcgccgagtggcccggatccacccgcccagccgggccgcacgcccccccttgccccagccacccggcgccgcgaacgacccatcaccagtcacgtacgcaccgctcggcgctcgctagctgccaccatctccctcccgctgtcccgggggcgctggttgtcggcacgcgggggccgggcgtctatttgttgcgcgcgcgggcgcggcggcgagacgcctgtgtagctactgctataaggagcgcgccgtgcaccgcctctcaca

SEQ ID NO: 6509 - DNA, 2000 bp, Oryza sativa
cgtccgtacggatcacgggagccacttgcgcaaagatcccacccatatccggaaccggacggcacgatagattctcccagccaacgcaccagttgacaaccgcgcagcagcccacctgtcgacgggcccattctatccatggccccacatgtcatagaggcatccacagagctacgcggtggagtacatgggacatggggtacgtacctggtgggcagtgaaaaaaaaaagcctgcgagcaggtcgtgggtgtgtacatgcatgcagcgcgacgggcgggggtggggcccagtacggcggtggtccagttgtcagtgtcagctacagggcggcccagtgcctattggctggggaatgggggtatgtctgtgctttgggggaaataacatccccgtgctgggcgttggggaggatacggtgcagcacgtacgggtacgcctattttggccgcttcctgcgccattccctgcgacggtgctgctgcctttgtgctgtcctcacctcacgtccttggttactcgcgcccgcgcactgtactactgccgctgacaccagtgttctgtttcctttcttcattttacagtactgtactatacgttttactacccctagatgttctctttacttttacgcatgtgcagcaatgcaggctgcaagaactccgttgcaagttgggtggattcgttgcaagttgcaagcggctgctagctgcctccggtgcctgctgttagggtggcagatgtatgtgtgcccagacgatgatcggaacagctgtgctgtgcactgcatgcgtatgcatcgctttttcagatggcagatcagccttcgtgacgtgtagtaacacgttgtgcagttactagtgggagtaggacaagaggcgtggtgtagaagtgtccaacaggatgagatcgtagcgtataataaagtggatacctcctcccatgcaagcatatcgtacgatcgtagcgccctcctaaagacgctttacaccatctaatgcaaatcctctcacttttgcttggtttcctagcgtctaaatatagcttgtccgtattattgtcattttgaccgtatcaaattttgataagacaataaactaaacgcaacgcaagaatcttcaggaagattgcatggacccctcaaactctaatcacaaatataaaagaggaagcatgagcctagtaaagcaagggcagtaaaattgaaagacactacatagaaaagagttcgatggcttggaagacactatatagaaaagtcttttatgggcatggttccctttcccatgcgggcatgcccactacattgtttcattttaagcttttattcaccatctctattataatatataagacaaatattcttcctttccttaaaaaaaaactaaacatgatatcaccaacttcatcctaccaaaatttggtagttttggaattccctctcacaaaaaaactatcaaaaaattagaaaggtatcaaactaacgcacatcctacgctaccacaatttaataataccaaaacttgagaaatgttggtattgctaaaattcgataatgttgattttaacagcaaagtgaaccagagccctctgcatattctacctgtctgccgtgatgggccaatgctgcaacagcgactaagcgcggtttgccgtctgcggagtgctcaaagcgaacggcccagctcgcgttctagcctaacgttttcggtgtggattgaattaggcccatgtagaatacacttgggccgtcacacgaaacggaatggaaagggcccaaaaagcacatggaccttatcgctggtcctcccgtccccgttaacaccaccggccgcctcgtcctctcgccatggccgcaccatccgcgagctcccgtgcctccgcgatctagcgcggcgcggtggctctcgcacccccggcgtcgacggagcgcggaggaaggcgggcctccgtacagaggcagtcgaggggcacgggatttaggggaaaggggttgggggg

SEQ ID NO: 6510 - DNA, 2000 bp, Oryza sativa
aaacgtagaataaagaacattgttgccacgttgatatcttctggatatgaaattgttttccatggaacagtctatcttgatagctaaatctgacgaatttaatccaaagaacctatttattgttctctgggtggtcttatccttcacattgtggtccagtacatgtggaagcaaggattcatctagtgcttactttaaaactttagcctccaaagttgaaaactatggtaaaaattcattacttgcaagttactgatagtactttactctttgtacatatactcttttcagtacagctgatgcaaccggggtgcaaatttcttgtggaagtttctaatgaacggtactcccttttattaaaaggaaaaggataagaggagggtcttaatcaatcatctaacaaaagttgatgacatttgatttagtgattacaatagctaagttaaatgtgctataataaaaaaataaaagaaagaaaaggagtactccttcatttggtgtacccaaaatgaaagggattacaaatgaccaatgtcttagagatatattagcttgaaaacaaatctgaatattcttttatttggacacatgcatacccgctgatcaggctacacgctttatcactaaacccattcacacgtgtatatagtattacatctatccacaaatataatcgattctagatatgcacaggagaagtacatagcaatgatgtctgaaatgtacgtgtaggtacttcctactttccataaaaaaataaattctgactacgaatatgaagaaccatatgtattagggtgtatttagttcacgctaaaattaaaagtttggttaattaaaatgatgtgatggaaaagttggaagtttgtgtgtgtagaaaagttttgatgtgatagaaaagttggaagtttaaaaaaaaaatctttagaactaaactcggcctaaatttatacgcaggatttgatctgttttaggatagggagtctcctcatgacatgtttcatgagaaggaccacttaattctgaatattctcttggacaacggacataaggtgaaatacaccacttaatttgcattcatgctaataaattacatctatggttaaccacaagacctataacatcaaatacctagagttgcaaagaaatcatcatctttttttagctttaataaagacatacactaaagtggtcaagaaaaatagtaggaaaccaatcagtcccagaagaattttacacattcttccttctttacttatctgcacaagacgcacaagaaagaccaggttatctctatgttaggctctttttagttgcaggggtgaaaagttttagcgtgtcatatcggatatatggacacacatttgaagtataaaacgtagactaataataaaacaaattacatattccgcgtataaactgcgagacaaatttattaagcctaattaatccatcattatcaaatgtttaatgtagcaacacattgtcaaatcatgaagaaatgaggcttaaaagattcgtctagcaatttacacgcaatatgtgtaattaactttttttgtctatatttaatactctatatatgtatccaaacattcgatgtgatatgataaaaagtttatgtgtgggaactaaacagggtcttcttagagtagatgttatcccggttttttataaggaaaaagagaaacaggtactctaggaccaggccatgatgaggccaagcggaatctggctcctcgaacttaagctgagccacagaagatcagtacgctgcgtccaccaaccttgcaccagttgggctcgtccatgctccataccccatgttaccccatcgctcattcggccgcgacagcgacagcgttccattgacctgacgcgcttcccgctactaatacccgcgagctccacctccatggccgcaaagcaccatcctctcgcatcaccaattctaaccctaacgacaaccctactctctctctccaacaatcaaagattcg

SEQ ID NO: 6511 - DNA, 2000 bp, Oryza sativa
tgcaaactgcacaatattagaggagtctcatccatcttcgatgctgggtgttcccaacccttctccctcatattctgcgtgcacacttttaaactgctaaacggtgtgttttttttgcaaaaagtttatatacgaaagttgcttaaaaaaatcatattgatccattttcgaaaaaaaatacttcctccgtttcacaatataagtcattctagcatttcccacattcatattggtgttaatgaatctgaatagatatatatgtctagattcattaacatcaatataaatatggaaaatgctagaatgacttacattatgaaacggagggagtacctaatacttaattaatcacacgctaatagaccgctctgtttttcgtgcgcaggagatttgttctcaactgcccacaacgaacacagcctttgacatgaagttggagtttaatttgatgcattctcctaattgtttcccctctttagatatgtgatagatttgtcatttgcacatggaaagctaggtagcagatagatttttggtgggccatgcattcttgccaatcccacattgataattgatggtggggaagcacaacttaaaagatagtctcatccattagacaagtcttttgggttgtatagtcttaagacctaaaattgtggcctcagtcgagcctgtggcggagcgagcccaatgtgattcgggtgacccacagtaagtgagccaggttgcgcactctaacaaatattttgcatcttattccgattatcacttgacttagggcctatttagatcctccaaaatggcaaaagttttatcattttggagcactttttaccattttagatctaaacactagtagcaaaagttggcaatttggcatttgtcatttgctagtctagggtagcaaattttgccaaaaatgctctgggaccatgcgcgtgctctctctctctctctctggtactaaaatggtaaaactttaggatgcatctaaacaccaactacatgccaaatcttttcccaccaaaacttttaccatttaccatttgctattccaaatgaatcaaaacggacccttagcaaaaattatgtaccgcctaatcatacttctcaggcggcagctgcaaatcgaacaatcaaatatcccgcctgcctgaccaggcaaaaaagtagggggctgtttggttgctgccctcgcctggagaccattgctcaggcaggtcgatccgaccgcaggcgaccgaaatcggacgcctgagatcgacgcctgagccaggcgcgaatctgagggcagcaagcaaacgcgccctagaactcatctgtcaggcatgaaaaaaaatctcaggtatgctgttcaggataccatggtcaggcggcagctgcaaatcgaacaatcaaatatcccggctgcgcaaaaaataagggggtatttgggagagaggggctaaactctcaaaaacataagtccctcccataggaacttatatttttgtgagagagactaaattgtttagccccactttagtccctccaaccaaacaccaactaaagctcatctgtcaggcatgaagaaaagtgtcaggcatggtgttcactgttcaagtgttcagggtaccatgatcacacaaaaaatagaactcatcggagaactgtcaagcatgaaaataaataccaggcatggtattcaggataccaaccaaacagacccttgatgccagcatgatcgaagcatggaactggcctgttgggcttgctgaaatgggccgagatcaaggcccattaaaacgccacgtggtcacgtggagcgctgctctccctccttggcgggcacgccaagcttagcacgcaccgtaaagtccaaatttgaccagtcaacaagtcaaagaaaggcacaactccaccttatcatctccactatataaaattcattttcgatcgatcgatcgctcactcacccacttgtctcacactctcactgagctcctctgcttctcgcatcc

SEQ ID NO: 6512 - DNA, 340 bp, Oryza sativa
catcgatcggtacaaattaattaactttacgggtctgaatacgaagattccgtgtgtgtatataccgcgtgtgaagtgttaacgtcggaatttagggtttgttccctcccttcttttcacaataatttgttgaaaccgatcttttcacaataattaacaatatatatatatatgaattaatgattaactgacgagactagcgatcgatgattaacaaatgattcacgagacagtagcaatcatgcaccggctgatatatatgcgcaagaggccaatatctcaactgagacagcatatgtcgatctcgatcgatcgatctggtgcgtgcaggacgaacaaa

SEQ ID NO: 6513 - DNA, 2000 bp, Oryza sativa
tggagattgaggcggcggtagcgggcgggacagctgcgaagatcgccgccgattgtgctgctttctcttgtccaagcgactagaaagggtttyacttcgacgatcgcggaacggacatacagtaagttcttgggtgttggtaaaatttgagatttcgttggcattacaatttacagagagttggtttttcatatgtagcactatcagattacatcctcgttagggtagaaattcatggtagcaagtggttatttttttggttttggcaatgtaatcaatggaaattttgttttagggtgttgttgatttcttggtactgcacgaagatcatcttatccagaacaaacaatataacctcttgctcctgccgagtgggactcgattgatttcaccatgagattctctaggaaacacgcatgtatagagaaaaggtgcctaaatcaaaccaaggtgaattaggaggtggggatttacaacgaatcttctaatgagggggcatctctcaaactcagagtgatatttgagagtggtttttgcaattttcccttaaaaataaaacacagtgttgcccatatgacaggcagcaagctagcagtaaccaaatgatatatacgtgtggcataagacttatgtgcaaaatttagctacttcaatataatacttctgcaatcactatgctcagtacatatactccatctgtttctaaatatttgacgtcgttggcttttttaaatatgtttgatcgttggtcttattcaaaaaatttaagtaattattaattcttttcatatcatttgattcattgttaaatatacttatatgtatacatatagttttacatatttcacaaaattttttcaataagacgaacgataaaatatgtgctaaaaagttaacggtatcaaatatttagaagcggagggagtaactaattattttgatcggcactaatttctggtagaaagatgaaacaatgtacgtacattcagtgcttcagtgagcagtgggctaatataaattgagtggttatcagggcaaatgaggcttgctacaggtgcttgactgagaatttatcaagtttctagggtgcacgggttgacagatcagtttatgctgctataaatttgaggagttagagctagcaaaaggaaataaggtatgtttgtacttagtttcctaattatgattgtgtatgcattgatgaatttgggaaacctatgcattgatgaatctggtgagcatagtggacttctctttttcttgacacaaattcatccatgtccatccattcggtttctcatctcagtggatttagagaacatcatcatagtttgtaaaaactccttacagataattctctatgaatgcttttagagttcaatttatacattggatttagcttgcatggtgtgtcgatgcattgtagagtgcttcgtaagttcttcgaatgattctttaccaatatgttatttgattgccccatagagttttcaaggttaactatgctccacatgatacacaaactcaattttccctctttcattgtatatcatttgttttgcgaacgcaattgtatatcttttatggcttttgaaaattttggcccaaccaatccaawtccaggtctttytcgtagactggctctatcttttctcgtcaaaaagaaagtatttatataataatatatatatatgttgcttgctctacctttattcttctttttttacgtagactgattctacctttttccgtcgaaaacaaagtatttatgtgacaacatgcagctagctagcttcacattgatagcactcccactccataacaaacacaatagttggctttggactgtttgctaagctactttattaattatagacaaattacagagtgaactcttttatcaggtgccatgcatgtgaaagttccactccatycacctctttaaaatccaccctcttcattagtctttgcactccagaattgggcaataatagcttgca

SEQ ID NO: 6514 - DNA, 2000 bp, Oryza sativa
actacaggaagtcattccttgatattgatattaggtatgccactcatgggtggtatgcaggcatggcatcagctacatttctgcagtcaaaggtcagaacaggatgttattttgccaagaactacgtaaatataattgacagagtgtgatgttcctgtaaatttctggttggtggacaggtcgggtagacatggtattatttgttgcagtgttcaacattttggtttattcaaatgtaccctttaaaatgtacaatgcatcaattctgaatggatagtaatgcaaagagtctaccaatttgttgttcagaccttaggggatctagctttgctaatttcctccccccaattcaagtaaccactatgtagaacgaaaaaaagtctgaatattgtgcattataaaaggataccagagccggcatcgtaatcaaaaatggaagaattatacatgtttttgaattttgcacatgatacctataaaactcaaataaacaccatgcctgaatcccgattgctaataatcgaagtaaacagctgatataacataagttcactggcgcatgtatcaaattattcacacaaggacaatctgtgacaaaagttaggcataaacttatccctaaaaaaggtaaatacttagttttcccggtcccctcatttccactttgctttacaaagtctgtccaacctaggtttcctatgcttgtggatttaccagatatcttcagaactgcagcataaactgttgtctaagctcctaagtgtaaaaagcagacatgccagagcattcagtttgtttcacatatctgttcacattgccttcagacagatatgatcagatacgagaacacaatgatccgttgattcccatggtagactctaacaggcagcaacttggaaaaaaawtaccccgagaacatggcagtgttgttttggataaaccttaggatggcaacagcatgcatgtgggcaaaggaattctacattatcaagcaaaagtttctggtcactaaaaagggacaaacatttaagtgatccatgtccatacaattgagctagcacaaaatatcaaattcctgaaccacaaaatattgagaaagaattatatcattgatgtatcaacttgtctaaaaatggccagacagaagctttgttacctgtttatatgttctgcaagaaattgatcttcatgcagttggaaaacaggccccaacatccgaaaaagaaatatgggaagaaacttaatcagatatgcttgagaggaggcttgccacttgtaaatatgaaagcacagagatagcactttggctcatcctcgcaaagaccaacatgaatttttgcatgagaaatcgaatttgagggatcaagcaggcctgctcaggagcaaccaggtttgccacttgaatacctgatatcacttctttttccctacatatgacttcatcagaatctcaatccttctgagatccacaccagatacacgctcaaaacccatctctgttcactgcacctgcttgatctcttctatgtcactgttcctctgaacaagctgtagtgaaagatatgtactgtgatagactgagtttactaaacgaatgcatcattttttccctgcatccaatcacttactgacagatgctgcaccatgcttgaaacagaagccaaggaagaaagaacattagcatctcaaatagagccatcaaccaccgcaacatagcttcctccaaaagaaacatgtattcttccaaattttgtaagcagcacatcctcacatgggtttctagtctaccaaacagtgcccaataccggtttgaccacgccacttcctgcaccagtccacatacatacccttcaaggttttcctttaaatctccttctctccctccatctccactcccatccctctgctcttggcagtgaacaactgtcctcctgcacattttgtcttcctctcaaaacattgccacagaatattgttcattcttgacacgtagaagagcc

SEQ ID NO: 6515 - DNA, 452 bp, Oryza sativa
ccgagcttgtcgcggtggtcgtttatacacacgttagctttagggtcatgttgtactacacgagaatgtaatgtttctctctctcttttttttttgaaagaaagaaagatagtaatatgttgtattacagcagaatgtaatgatatactagtatgtaggaaragtggaaggtagttttgggaagagaaatggggatktgagtagtttgtggttgggagtktaacgggtggggtggtttggaaggtgatgaggtattggatggagtggagggaaggctgaggtttgccgacgagttcccaaaagtgggatacggacagatggatagatagatagatagatagggccggcaacccagttgggttttcctttcctttttgcgttgataaacccaggcgggggcggcgccgcgcagcttaccaataccaattggagtagaaccaaccaaggaaaga

SEQ ID NO: 6516 - DNA, 2000 bp, Oryza sativa
atacataaaaatatgcaggaaagtttttcagtagctagtttagctcttgattaattataattaatactggtggtttaaagacctagagaatcaatatctctggactctggaaaccctaatactgcatccgttctaaaatatagaagtttttggagttagacatgagtattaaaaagttacgtagaattaaacatgagaaatgttgtaattgattgcgaagagaacgtaggtgaaaaaattaaatgaaggaagatttttttggttgataagagaatgtagatgaagaaattgctatattctgagaaaaaaaaatgaatgttagaagtttctatgtttttttaatgaagggaatgtatatataacatctcttaatttattgtgttgaaaatagtcttaaattaaatcagatctgttgatctcgaattcgtgaatggattaattttatgaccctggttacacgtaaattagaagtgaatttgtattgtcaaccttttttttcatgtatcataatataaggcgttaaatgcatgcatacattaactagcatctctttcttctctaaatttggtttgttttaaatctactaccatcaagccccccaatcacattacgtgcatgcatcaaggtgatccaatcgagaaggtaattcaattatttcttagatattttcgttaataataattgtgtcctatattttagtacgaagggagtatataggtcagtcataaataaggaagtataactggattaggatatgtcagaacatttttttcaattaattccaggcggatgaagcgtgagatcatcgaatcggtgcatctatgcaacagccaagggatcaactttttgattgagcacctgatcccaacccccgatggaatatataacaattattttttgctaaattccaatctaatttcagtcaaattgttttttttcaaatttgaattcttaaaaacattcgagaaatttcactcgtaatatactttttcccacaccgaaaccacaaaattgcgtggttttcgaccggttttcattgaaaacttatcagcgtggatcgagcagcctgtctcgctcggccgacgtgaagaatattgacctaagagatatatatatatattatatggcttagcttgctggctggctaatgctacagtagcggtagaattgatcggagaaagaacatcagctgaactgttcaagggtgaagaaggcccagtcgtcactgctcaaatttataggccaccgcccagctttccatagaggtccccttcaatataattcgcctcccgatccctctctttcaattttccttcctagtactgcaactgtagagacagtcaaaataaattaatcgatatataattggtaaagtatatatatatacatatccccaattcatatagtataattacactgttctctcctttttacctggggcactagtacatactgtacctagcaaccagcaaattgttaattttctgatacatatatatacatctgtaactgtagagatatatatggtagtagtatatgtcaattcttagccagtattgcatcgctagctagctaaaagtaacagctattaataccggcaaataccatcatgtcagctgcaggtcctcatcgaggccggcgttgtctaagttttaactaccctagctagcctcaccaattgcaattgtgtacactagctagttgcatcaatcaatctcactgctagtggcgtgcgtgcgtgtgtgtctagttagggctacttctactgctgcttctcctcaacctcttcttcttcttcctctagttgctctctctgctataaagtgccgtggagatcagggggttgggtactggaaggtgatgagagtactcaagttgatcgccggagcagcatcagcatcagcatcagcttcaccatgcggggatcagatcatcatcaggatgtcgtcgcggcaccgcggggcgktgccggttgaagaaacgacgggcaggcgcacgaa

SEQ ID NO: 6517 - DNA, 2000 bp, Oryza sativa
atataatttttacattttcaaacgcaacaacttgagagttattcatggtttatattcccaaggtttgacttaaatattatcctaaacgactttctacgagtacggagggagtacatgataaaacaataaaacagagttccaaccaaattatgatctaataaaatgttttatcacattatagtcacatgtgactactgaaaaaagaagcctgcaccctcatcctccttacggcatgggaaatttgataggaaaggaatcatagggttttttacacaaagaactgtatgtcacatctctcggaggacaaatcaaggaggaggccaaaacttggctttagtaggagcaaaacacttctacttccttagtgctttcctttctcctacattttttttcaataccttttcttctgctatattcaatgaaattggtatattagtgttggtttctttattaaaaaaaaagagtaaatatgggtcctaagatctaaactatagtgtgaggatcatgcatagatattttgaccaccaaagtagaagtaataaaatgatgacccacgcttttgctgccgaatacaaggataaatgtactcttaatattatagaaatgatgaatggtatatgttgagatatcttagaaatgataaggggtgataatttgatatgcttgcatgtggagctttaatttaataaattgtagtagatgatgtgggaatgtttgcatgagtattaagatgtaataattattagcggatagtgatatggtttgtttgtacattaagatttagaatgtaatgggttgtaaatatgtagtaggtatagaatttttttttagttttttttattgaagcttcaattaagattagtcaagatttcacatgaaggattatgtaacaatgtagcttagaattagtaagggtccatggccaaacttccaaatacctttctattggaggaattttcaattgttattggacattagagcctcatagattaatagtgttcaactaacatgggatcatacatactggtgataagtatgtctcgatgaaaaagcagagtatggacacatatattatcactagttgtattcccttgagaacgaccttatgcctagaattatcaagcaatgtcgcatgtctggatttttgtactcttaaaaagttcgatgtttttttataacgaaaatggtttgtatcctaatctctgccatacaatacacaatcaatacggtactagtataaaggagcgcatacacgggtttatgtcagtaatatatttgagggctatttggtaaggtttcaacttataaatttaactttaagaattaagcctgtagtgaagttaacccagctctatctctgaagttcattttgtgataacactccaatcagttccactcaattggtcttgacgacccaatttatttttacgtatctaggtatttgctcaagttgttcttacctttaacctcccaaccccttctctctctcttcgcacgcacgctttttaaactgctaaccggtacgtttttttaaaaaagtttctatacaaaagttgcttaaaaaatcaaattaatccattttcgaaaagaaattagctaatacttaattaatcattcagtaatgcgtgctctgttttacgtgccggggagaagagattcccaaccgctcctcccgaacgcagcctaaggtcaaccgtagttatatatgcctcgggtctattttttttcaagaaaaaaaaaacgaatcagatcatgtccacactgatcagatctttggagaggcagagacgggaatctccacggcgatcacgtccacaccacacagcacgaatcttgacgtagagcccagcttgtatataatggcacgcattcctctgcacctctgcagtctgcacacacgcacaagaatcgagtgagccagagttgagagttcgttccatctcccttcgctcgccacgtggcagccgctagtccttatcgccgccgccgcccacctcgcc

SEQ ID NO: 6518 - DNA, 2000 bp, Oryza sativa
gtacagtacggtaagtggagacttcatggaggctctaacggttgcaacaccggtaatggaggctcaagaccccatagcccctatgatagatccgccattgagttgcactactacgtaaaagatttttcaaaacgagcaaaattgtcttttcaaacagacaaaacaaccacttgacactagatatatatagaaataccaactatcatgaatgggcaccgtagccgaatgcaaaactttattttcctaggtaggcatgttaagctgtcagcttgcaaaagaattttggccaaaaaaataaaaaaataaaacaaaaccctagctaggtctgcttcacctcgccgctgctacacaaaagctgtcacggctgtccgaagcccgttgccacccgaagcctgccgccatccgtagccagtggatctgctcgtctcggggctgattccattggatccgaacattgtgaggctgtcagcggcggcggtggtggtggaggagcagagggagaggatgtcgtgaggccaccggagatggatgagccgagggagcctccgccggataaccagctgtcatgagtcgctggtgagggaggagaacaagtcaagggagctagcgacggatccaaccgtcgcaaggccatcggctttcggatccaactgtcacgaagtcatcaacggcggaggaggagccgagggagcatacgcgacaagcctgttggtgaaggtggaggagaaaccgagggttcccctattggatccgaccgtcatgagaccaccggtgccggccgtcctgaggctgctagtggtggaggaggagccatacatgtcttaggttattattaggccattcataatgcacctatatggcattcagccaatcgtagattccccgccaactcagcttgtagcgtgaccaaacgaagttcgggtagcccagtttgggcacgcgtttttcgtcagaaaagaagccgttttctgacgtgcgaagcaggggaggatggagcaggcgcactgtgaggttgtggcctcgggctcgtggcccagtggtgacgcctccacccctacctggcatcggaaaagctcatcgaactgcctccgtcgatctgcgtcggaaagggacgttgcgccgtcgccggaagggagaggccgccacgggagccggaaaggagaggggagaggccaccgcgggcaccggaggagagaggggagcgaccgtcgcgggagccggaggggagagaggagccatcgccgagcttcttcgatcctccaccgagctgggtctggccgcttggagagtagaagggggcggctgccccggaggagctcgccgttgattcggagccattccgccgtccgatgccgtcgccccttgggacgccctgccgcccagtgcagtcgcccctcaggacgccccgccgctcagcaccgtcggtgctcgtggcggccccccgcttggcaccgttgctgcccgacaccgccgctccgctcggtctcggtttcttcgctgatgtgaaacgatgagattgataagtgagaggaaggagagagaggaaggcagatgaaaagtgaggggaggacaccggtgggacctataataaagtaagatgcactgtggagcaagtggctactatagttcttcttaggtgtgtttggatctaggtggtatgtgaggcacagtaaatttatgtgacgcgccttattattagcttgttaatttgtcagtacctcggtgcatttcgcttctaaactcttcttttgacactgagccgacgtggcaacctaaaaagaaaacatactactcctacgtggccgtgtccacggccatgtattgaaacgagctaccgagaaaagtgaaagcgggtcacccgtggccttgggcccaccaaaaacggcccaaacaccgagcaaagcccgtctgtcccgtggccggcctcctccctcctccgtccgcgctcgctcgttcgcttcttggtccgcaagccctccacgccgcctcctctcctagcg

SEQ ID NO: 6519 - DNA, 2000 bp, Oryza sativa
ttttattttgcagccagggtaaaaagattattaatgataattaaagttagttttgtctttaaaaaaaatcgagtgtgaaatttggcagatgcagttacccctctgctccaaaatataaaaagtaaattagattggacatagtataatgccatgccatgtatctagaaaagtaaattgcgttgactttataacttggctaggtgagtgcgctcatggtgcaactagtggacttgaattggtttggttattggtttagggcttcaactagtgtggcacacggagccctcatcgccgccgcgatgtagttgcacggtttccctcgttgtcgtcgccaccgctgccaccgccactgcgtcgtcacccactactagaaaaagtatttttccaggcggcaaaaagtgattttcgcaggcggagagttggaccgcctgtaagtcaacgactgtgaaaatcatccattttcgcaatcggggtaacagctcgcttgcgaaaatacattaaaaaaacaaaaaaaaatcacatgcggcgggcaaaaaaatcacgggcggcagtcgtcgccgccgccctcctccagcatcgccgcgccgggcaagaggggaggggaggggagccgcgccgggcgttgttgtcgccgccgccccgcgccgtagttgccgccgccggcctctccactccctcctccggccagatctgggagggaggggttaggggagccgccgccacggccccagcgcgcatgtcgtcgtcaccgcagccccgcgccgtcgtccgccrccrccgccccgcgccgtmgccgccgccgccggcctcccccctccctcctccggccagatctgggagcgagggggggaggggagccgccaccgcggcccccgcgcgcgcgtcgtcgtggccgcggccctgcgtcgtcgtcgctgccgccgccccgcgccttagccgccgctggcgcctcccccctctctcctccgaccagatctgggagcgagggggaggggagccaccgccgcggcccctgcgcacgcgtcatcgtcgccgcggccccgsgccgtcgtcgccgccgccgccgccgacctcccccctccctcctccggccagatctgggagggaggaggaggggagccaccgccaccgccgctcgcgccgtcgtctccgctgccgccctgcgccgccggacgccgcgcgccgccccgcgctgtagccgccgtgggagaggccggccgaggggaggagaggggaggggtgcgttttgagacttagaaaaaatctaagtctatccaaagtctatttatagtcaagtctattttcgcaggcggatctcttaagcggcgccagcgaaaggaccgcctgcaaaaatagattttcgcaggtgaccgacacattcacctcgatttatatttttgtaggtggttatttggctctaagggttatgtccgcttgcgaaaatgagacccgtacgtcgggaaaaatgctttttctagtagtaactgccaccaacgcagccacctctcgatcaggatcacgtcaagaaagatgaaatgagatatgtgtacgttaagaaatcatattagggggttttctataaaatgagataggtctttagcatcaacgcaatttactcattctagatatattctatgaatcaggataagcgcgctgtctagattcgtagtagcagtagcctgcacggtgaggatggcatgcatcgcttgttggcggcgcggcgctggcgcgtaaagttcgcgcgcttctctgaaattctgtttcgccgggctgagaaattctcccctgaatcccgagctgattctgttttgcgcgtagatagataaattcgagtttatcctgtgatgattttctcgtatcgatctctccaacccacccgcccgccgcactatctccagctcttccatggcgatggcttgtcggtggttggtggtggttagctaacacgcggcatcttctcctccgtccattcgtccgtgtcagcgtgtgtgttgccggtg

SEQ ID NO: 6520 - DNA, 2000 bp, Oryza sativa
taggacttagttctaggtacccagatactactaagatacctatccctattagtctgccagcgtggtgatggcattttacgaacttttacatcacatccaaacgtgcaggaatataaagaacaaataggttgtcaccacctgtggcattcctcacttttccatgatacatacccacatccaacgaaacttaagtaacctaagcaccatgcttatgttaataaaaaatatcattaattcctggggcacccatccttcagatggacaagttagaagtagtgcaacctattaagattttttggaccgttaccgtagcatagatcgactagcctaatcatgtgaagtataagctattcatataacatgtaagtagtaaagcagttcattgaactatgaacacagtataatgaaaaagatattagacctatagtcttataggaagagtaaagtactaaaaacatattggaatctccgaggagacaataggaccgaagaccactctaagcctaactccactgctagtagagagaatatactatgtggaaagagagaattgctgcttgaggtgtgtgttgtgaagtgagaagctctcctccttaaataggcttataatgatggtttaaaagtcggttttgactggaatccacacataaccgtcattgcgagttgctgagcgagtgacacgtggagggtggagaggccgaatcctgggccccaccccctcaactgcctttcttcagaagatgacatgtgggcccctatatgacggttttggatgctttggccacactttagaacgatttgatttgacttgagggccctcaattcgtgtgctcgcttgtgatttgtctgaagtattttttttttcatgtttgctcatttatccttcactttaacgtataatccctacatacatagtaattctcaagacaagtggaattgtattatttataactaatataatatacatgtaagaaaatttagttctctccttatttatcggtacttatcggccgtcaacaacaccaacaaatctgacctagttatctttgtcggtctgtaataggcagccgtcatggcgatgactcgttaatgacggccaggtagtagcatggctcatttgtctgatcaatctttatcggtatcaggtttttagaccctgtttagatgggactaaaacttttttaagtccctatcacatcggatgtttgaacactaattataaatattaaacgtagactattaataaaacccatccataatcttggactaattcacgagacgaatctattgagcataattaatccatgattagcctatgtgatgctacagtaaacattctctaattatagattaattaggcttaaaaaatttgtctcgcgaattagctttcatttatgtaattagttttgtaagtagtctatatttaatactctaaattagtgtctaaataaagggactaaaattaagtccttggatccaaacaccgccttagttaggcctgataaagatgactgctatcggtgacagcagatggcctgacacagattgagttttcacctgactggccaagccattcgctgacacatatgagggtttttcgtgcgatacagatgacctgttcatagtggacatagtacacgtaaactgacactgtatctttttttagatttttttagaattatctttttttaagataatgaactgacactgtatctgtagccacgtacaactcgctcaattatcatgtataattctgtctgttattataacaaaagaaattgccaagtctatagctatttggttctcatcatctgccatctatagggcatgttgaacaaaaagatatgttacaatatacagacggcctcatctcatgaacataaccgttgactgagcacacactgacgcgtgtattctaaatttctaatcttggggacggcgccatccaatatcattcataattcctaacaggtgtatccatcaaaatggaaaactaacca

SEQ ID NO: 6521 - DNA, 2000 bp, Oryza sativa
ttagtgtgattctatatgaaccccaaatcatactgagtttaagtgcggatgctactatgatctaatgcactcattcttaagaactacaaattaattatatctccgttcttttcagcctattcaatggattaatatcgccccagattatttactccatatgcttcttgaaaatatgatttgttctatgctgtagtatttgttaagtttatttcttattttatatacttttttctataatcaagtagataattcacaataattcggtgaacatctgtttcaaacactactccctccgtcccacaatataagggattttgagtttttgcttgcaacgtttaaccacttgtcttattcaaattttttttgtaaatataaaaaacgaaaagttgtgcttaaagtactatagataataaagtaagtcacaaataaaataaataataatttcaaaaaaaattgaataagacgagtggtcaaacgttgcaagcaaaaactcaaaatcacttatattatgagacggagggagtaatatctaatcctgaacagtgacatatgggcttgggcgcttgactaaagttgtccttggatgctcttaaatctcatgatacattgatcaatcgaggtccatccaacgggagatgaacaatgattcatggccaagtggactccgaaaagaggagataccgaacctattccatggaaccaaaaaaagaatggacgaaaactccaaatcccatcgccgtgagaggcacagatctgcatgcagacagccttaagcaaagcaccctatataaacccggcctaaccgctgcagatgaaacacacaccacaccaagctctcaccaagctggacatatatatcttgccattttgctgatccattttctgcttaattgctcggttaatccctgcaaggggagtagaactgaagcaggagatcgagcagctatcttcttcagagaaaggtaatttagctagccatgcattggaaaggatctgtaaatgtgttgcacgcacgcactgaggtagcaagtggtagaatgcaggagactgttgccatcttatcttagctcttatgatgcgaaaatcgatatctgttacagtgaagttttcggctatctgactgacctttgcgcgtcagcgaaattgagtggtgttgccgcgctgtgatgatcctttttttttgtgtgtgtgctatatgcgtgtgaggaccgttgactcggatgctggggtaacagtgtggtgtggcaagtaggtacaccctgttcgcccgttgacccccataaacacatgaaaatcgtagtgcctcaagacttcaagaatagtcaagtctgaacaaaattgtacacctgaacagtaaccctttaggattttgccatttgatgtcttctatcatatctttgccaaaaccagaccatctgacataatcgcccttgtgactcagcgatcacatttatctagctctatatcagatgatctggttacatttttatccatcatctctatgtctatgtgaacttgtgaagtagatatatagatttttttttcttttgataaaagatgatatctttttacgggtttatttggtagaactataacttctagattctggtggaaaatagggctaactccagctttaaatttttaagaatcatatattcctcttactcttaggccagcgttcaatgtccactctagctgtgcaatttgcagtgtatcacctttctccccaacaaggccaccagccaccgttcccggcagccgccgcccggcccctcgttgccgacatggtcctgcacccacttcgctcgcgcgcgcgcgcgcgccgccggcgcctataaatcgcaaccccaccccggcctcacccaccacctcgcacttgcattgcagaattcgcacatgcatctacgtgcataggtcacagcctcctgctgctgctgcacactgcttgctgtgtgttgctgagccgtgcactctgtgttgccagctgatcagctgagacc

SEQ ID NO: 6522 - DNA, 2000 bp, Oryza sativa
tcttgcatttttcatttttcatgttccaggacctgttactttaacaactagtagggtctttcatttttcacagctatttcaaatctttacaattgtgatccacgtttcttatagatcacggacttgcctccaggaagacaacctatagaaactcttgctcttgaaggaaatgatgctggttttgaatctgtcttccaggtgatgacatgacttcattcaatattttttctttttgtttcagatctttgttgttttccttttctgtcccaatctgcacttggatatggttgggatcaatttgcttatcatttttaaatacttatggcttgaagatgatgagtgatgaactggttgatggaggcaaggtctacctcgtatatcctatcatagaagaatcagagcagctaccacaacttcatgcagcaaaagccgagtttgattccataaagcaaaaatttgaaggttatccctgtgggctgttgcacggtcgcatgaggagcgatgagaaggatggagccctcagcagttttagatccggggaaacacgtattctcctctcaacacaagtgattgagattggagtcgatgttcctgatgcttccatgatggttgtcatgaatgctgagagatttggaatgtctcagctgcaccagttaaggggtcgggtagggcgtggcgaaaggaaatccagatgtgtgttcctatgctccactcctagcgcgctgccaaggttgaaggtgcttgagaagtcatccgatggattctacttggctaacgccgacctgctactgcgtggccctggtgatctactcggcaagaaacagtcagggcatcttccagagtttccaatagctagactggagattgatggcagtattctacaagaagctcatcttgctgcacttgtaagttcatttgctaaaccccaattcgtgttgctattaatgatcagacaactcttctatcactgtagtatataacttatttgttcatgtttttaaaagtagcttttttgtggcagaacgttttgggaacaagcaacgaccttgcacaatttccaggactaaaagttgagctcagcatgagacaaccgctgtgcattcttggagattgacctgtgatctttactgagcagacagtgcagtgagagtgtgacactgaacagcgttgtagtgctcattgggcaaagcttttgcattctggcttgtgcggtgcaggtgaacaatcctttttcagatgctggcaagattgcaagttactactagtagtattttatcaaacactttttttagcaatacctgaccagtgatagattgaaaaaaaaatcaggtaacatgaatttcattatcatcccaaaaatggctttcgccaatttggaatgatttccttatttatcatgggcacagtttaaacttgcacaaacacactagcactactcctacgtttttactgtacaagcttcccgccatgacggtactggcatgtttgatgtgacgtgacgctcgataaactcggtagtcgccgcacgagacttccacgtgcggtctagcacacgctcctctcgctcttccagcgcaccacgctagccaaggcgtgccatgtggatctttttccacgtgtcgtattttcattggactggtgactcaattcgtgacgttcctgccacggtcttcttctcacctttttcacatgagccctcaattttttctacatattcaccaagaatccaaagcaccttcagcagcaacgcacaactcgaaatcagaaaaaacctttcagggtcataatcgaaaaaactccgaacgcaagaaaaacaatcacaaaaattgcaaatatagcacacgcccttctcctcctcctcctccccgtcgagatcgttctccccctcccctccttcgctgctctctcctctccccttccaccgtgtgtgctgcatccgcacactagtcccagatctccaaacctaaccccacgcatgcatctactagccgccgctcgtc

SEQ ID NO: 6523 - DNA, 2000 bp, Oryza sativa
atatattgttattcgatgattttgcatcaagaaatgcccgaagaaatatcttttcataggaagcaatggatgtgatgggattctattcttcattaagttaatgaataatgatattagttccaagttacaaatatattgttattttggtcgactttatttcttgataattatcaggcatgtcaaatttaatatatggatgtatttgttttcgttttgcaagtaaaattagcgtatatatatatcaataattttatatatagcttagagggcccatcgcgatgagttcgtctagggccctcaaaatcataggaccggccctgccgatggtgtggttatacaattatgagtgcataactttatctataaggccaataagggtttagatcctaacggcatatgacatctatctctttaaaagcaagaagtagtgggctataaaccaactacaaacttatatgtggaatagagatataaagagcagtgctatacatccgactcaatcatccaactcacgtgttgaaccaaccagtaacagtaacagagctcattgtcattcatgtggattcagccaaaaacaagtttatatgtgttgtacgtgggttggacaggtagggtcatacgtatagtcgttctgataaagaaaagaatattagctctcatgtaggagctagctatacatatgttttaagttattttcattaaattcataatgaggaaaaatagattttagagaaaaatagagtcaagcttatagttaatttattatacatgttagttttaatatgagctaatagtcaatagttagatatactattaaacttgctttaacggtactcgtggggtgtgactatatgcatgcgtgtgcattttttatatgatcataaaaagaatacatgacaatataatatttttcttttattaatgtggtaatttgtatgtttttaaaaacttaaacgcctgatggctcctttttcaacctccgtttatatacaacgcacgatcacatatcttagtcaatcaaaggaaaaaaaacaatatgctatctgcactcatatacgttcggtgcaatatcatactagggcctataagttcgctagttgtgcgcatctcggatatgctgatatgctacactcacttcttgttgatgtctaattcccgccgcttatgaaaaaacatgcattggcatcttcaggctttgcacaataaagacaatatttttagcatgtccccctactgatcagattatcatggcacactttagctcattgaaagaatatgctgaccattaggccattaatcttgcccgcgaattaacctgataactaacttaacaacctctgcgcgcccccactactgtaatggccacgccaccatcgccacagatcaatctggcatcgacacaggtcaggaagcatctgacattagtgcaccatcaccgtgtctgtgtcttcaacacggcaacacctgacaactgacgagaccaaaggtaatattacctccgtcccaaaataagtacagccgtagatatccatgtccaacatttaaccgtccgtcttatttgaaaaatttgtgaaaaatttaaaaatatttagtcacacaaaaagtactattcatgttttatcatctactagcaataaaaatactaatcataaaaaaatttcaaataagacgaacagtcaaacgttgaatatgaatagtgtaaaactacacttattttaggatggagggattactaagcagtatcatcatcttctctaaagccgttcctgttccatgtataagtatgaatccacttttagttcagagcaacagtacgaggtctcctccgttataaatacgcggcgacgccgcggcgactctgcagaattcagcaacctgacctctcccgttctcctgcagctagcctccggccagtctccagcgcgtcgccctggaccgaaatattatgccacgttcttctcgtatgaatctgtggccgcattgcttcccgtgtttcgacg

SEQ ID NO: 6524 - DNA, 2000 bp, Oryza sativa
ctccctccgtcccataagtgattttgataatttgcttccactgtttaaccacttatcttattaaaaaaattatataaatataaaaaacaagaagttattcttaaaatactttagataataaagtaagtcacaaataaaataaatatgagtaaatttcatcatgggctatattttttttaccagtgtttcatattgggctagggctaagtcaagattttcactttacaccatgtttctttgccaattgccaagagttgcactttggggtarggtatgtttacaacctggggcatgtgtgactgacctcgccgtagatattatgattggattgtgatggcactcaattcaaacaactttttgatgcgcggtgtggcacggtttaggtagagatggctaagcccactcatgacatgacgaaagaaggagatgtgtgctatcgtttcatgcgtgcagaacttccttcgcatatctaggtgttgccacattgcaataatctctattacaagcttgccgacgtccacaatccaatcatctccatcacaagcttgccggcgtcctcccttatctcctgatctactgacatgtgagagcatctagtccaaagtgaaagcttttggtaaaagaaactagcccaaagtgaaaactttgtctttaggatggtccatgttgaaacttaggtaaaaatacctagaccaatgtgcaatttactcaataaataataattctaattttttaataagacgagtggttaaacagtacaagtaaaatgtaaaaatcccttatattagaaaacggagggagtacgtggtttcaattctctctcttccgttcagttgtgttctctgccgagtgatgctttggagctctctactatcactaaaaataatataaatcgtttgctattaaaggtaaatcggtaatttactaatccatggattagggataactttgttatttataatttttttctagatcgatatatggccattcattctgttgtctctataaaaaaggcaaaaaggaataaaaatattgtcacaattaaataattattatatctatctagacctattttttacaataataccctctacgtttgtagtacggctaactagaataatagtataaatagatctatactcttcgatccaatgagattaatggtttatattgtcttatattgtcttttagagtaaatttcaaagtacatatactttgatcaaattatcacataactacagattaacttgatgtatcacaaaactacacatttaagatgaagtgtcacaaaactacttgtttagtaacacaactacaagtttagaaccaatttagtcacacaacaataatgtttatagctccagcataattttgtgataacttcaatattaaatatatagttttgtgatatttaaccttaaatatgtaattttgtgataaatatggtgttaaatccgtacttttatgatacacattttaaatttgtatttttgtgataatttaatcaaaataccaatagttttatgaaatttacttatttttttattaccaaaagagaacatcctaatggggctcgggggtaaaaacccaccggcgcaggggcgatgcatgtgtccactgcagcgacggaatcatgcagatgaaattatcaagcacatgctccgcctcgccaactgaaacacccccacacgggatggcgggaatcaaacatgggaggaggggaataacaacgtgctgaatgggggcctaccggaacaattgagcggtcaaaacgtccttgcgcgcgcacacggacgtgacacgcgacctctcaatctctcactcatatatacccaacccaccccttatcacgggcgacgagacgtcccgctggtataaaacggccccctcccgggacgccacgatcgtcacaagcaaacgcacgcgcccccgcctatgaaagcccgcgcgcaccacgcacacacgcacgcacgcagtcgcaggcgccgcagctcgtctcc

SEQ ID NO: 6525 - DNA, 2000 bp, Oryza sativa
ggggatgggcgcaactcccagacaaagtcttgcgcgagcactaccgccggatcccgtgcgagatcgatcgcctccactcacgccgcgtctgccactcctagtgcgcggcgctcgcgaggccccgaggcgttggggtcgacctccacgatggcgacgatgcagcatcagctacagtgctccggcgagggcgcggcgtccccgtcggcgagccagagcgcgagccagagcggtgacgacagccgccaccgccgccacggcaattgcccagacgctggagggctcgacggagacgagcaagatggccaccggtggcgccgggcccgcgccggtgttctcgatgctagagagctggctgctctgacgacggcggcatggggcatggaacggggaggtcgggaggatgatgaagggatagactgacatgtaggtcccacctgtcagtgggtcccacaattttgtgtgtttgtgaatgataagtgagcccacatattttttttaattctaattacaagtaagcgccacgtcaacgcctcataggacgaagacgggtcaacatcgccacataacatgccacgtcagcgaaaccgctcaccaaaaccgtcgagggagtcaaattgcaccggttttaacagtttatgtgtcaagattgattgggtcaattttaagggagtaaaaatggacttattccgatgtacaatgcctcgcgcgattgcgattcgtgttggagggaggattcaagcccaacagaaagaaagaaagcccagtaggagcctataatacgtgaagacgtggtagctgtttgcaccgcacagtccacccactccctttactcagctgtaccactcgctgacacggactggagtacgaatttatttattyyyttgttcataaattacgaaaaatatagagagaaaaataatggctcgaatgacgatcctagtacagccatactagaaatgacggttttgttttgccccgatccttttttaatttctttctttttttaatcgttacagttacaggtattaattctctctagtactacattggttgcatctaagaggaagtttaatagtataactagctactagctctaaatcacctagccaacgtaatagtcgatttataaaatagttgtttcatttactattaggccagtcacaatgggggtttcactggtgtgtcatgcacatttaataggggtaagactgaataaaaaatgattatttgcatgaaatggggatgagagagaaggaaagagtttcatcctggtgaaactcgtcagcgtcgtttccaagtcctcggtaacagagtgaaacccccgttgaggccgattcgtttcattcaccggatctcttgcgtccgcctccgccgtgcgacctccgcattctcccgcgccgcgccggattttgggtacaaatgatcccagcaacttgtatcaattaaatgctttgcttagtcttggaaacgtcaaagtgaaacccttcactgtggggattgtttcataaaagatttcatttgagagaagatggtataatattttgggtagccgtgcaatgacactagccattgtgactggccttaatacctagtctcatctatcatacacacattacttttagagtccatattgcagctagctacagatctgtagtccgctgcttttctctttcttcttttatctatttaaaatatatttatagttggtttatagactgctattgtatctgctctgattgataagtactccgtgctccgttaatttaataaagggaaggcatggaaactgaaatggaggtgtgtcacgaggaggatagcggcgtgcgtgcgggtagctggtacctactccaagcaaaatccaaaatccaagcagaaaaaaagtcatacgcattcattgtgaaatggaccggcgcaactccccaaataaatgacgcgccttcgccacacatttgaccagaccagggagagatctgctgctgctgctctccaaccaatcaacc

SEQ ID NO: 6526 - DNA, 2000 bp, Oryza sativa
aaatgttgctaacgttcaaaagttacttggtcaccctgcttttgacatgaggaatccgaacaaggtatgtgattcttttccttcaaattttttgagtacatagttcaggaccttacagaaaacatactaaaaatgcaggtgtattcgctaattggaggattttgtgggtcccctgtgaatttccatgcaaaagatggctctggttacaagttcttgggtgaagttgttttacagctagacaagataaatccaggttctgtttcacgtgctaaatgaatgaacaaacactagtttgcctatcaccgtctgattgtggttttttgctggactgaaaatgtaggtggcctcccgcatggtgtcagctttctctcggtggaggcgatatgatgagagcagacaagctcttgctaaggtatgtatgttgttgtaacaccggatgatcacattgctttggtctaaacatgttgatgttcctttgttgtacaacaggctcagctggagatgatcgtgtcagccaatgggctatcagagaatgtgtacgagatagcttcaaagagcctggcagcttgaataatcccgtgagtgaacaagtcagtcggtcctgcctctcatcacatgacatccacacagggtgctaaaagtgtagttaaactgaatatgtttatgtggcaagagtaaaagaaggctgcttttagactggtacaaaactctgttgcttatagtatcgcagaccccaaaagtaatgcaattctttcttacgcgatggctctatctggaataactggactgatagagtttcttgcagtatttgtttattgcccttgccgtgttggtacttggtaggcatgggttgattttgtcgaccgatgcttggattgtgaccatgcgcgactctagtgatgcagctgatatttgtttcatcatagtaacagtaatactaacagttggtgttggggtgggktgggggcgtgtaataggtgtgtgatgcttaagctggcagtcagttgagcatctgattctagtggcaagggaagagaagagatgcttagcatttatatttagtggaggtgaagcttatatgggactctcaaattggttcctgatgctagagtttgcttaacaacagccagcctggtgatctacaatttgagtggcatagtaggagtatggtactagcgcccttatttgcctaagggcagatgatttgattggtcaggacattattatcttggtcgtactgtggaaatgggtttgggaggctatagcgttcttatcctagatagcatggggacggtggttggagggagtgaacggaccggcgtgcgcgagacgggctagactttcccttgattttttgggttggatggggagggtagacgacgcgtccagaccgtgtgcgtgcgtgcgtgtggctaaagaaaggagttgttcagagatgatggatgggatcaagtgggcaagtgctcaacaaatgtaaggtcgctttcccttccatgtggcgggaatcacacggtcatgttgtaggtcttctcttctccacccaagtcaagaatgccctgcgatatctgagtaatagtagttgtaatagtaatactagtaattgtaggagtaaatatctggaacaatctagaaattgcttgctacaaacagagctcgctctcatctcgtacgtcttgtatcagtatcaccggggtgcttagctgctaagataaaactgaagtgacgaaggaaggaaggaagcaagtcgtagaagaaagtgaccaacgatccatccatccaacccttccaaagaccaagatgatgatgatagcttctcctctactattaataccccttctacttctccctcctcatctcattcattactcactcttttactcttcttgacaagagtagaacaacaacaacatcatcatcatctatcacacacactatcagggcaggtgatcgaatagctaggaagcaagcaagcagagagtagtagatcgagtgatcggagg

SEQ ID NO: 6527 - DNA, 2000 bp, Oryza sativa
accggctgctaagagcaaaagtttaatagtatagttaactgccagcttcaaattatttatagctaatttaatagccaattcatctaatagttgtttattatattattaatatctgatctcacctgtcatacacacattacgtcttggagtccgtgttacaactggctacaaatgtgtagtgtgctactctttcctcttttcttttatctctttaaaatatgtttatagctggcttataatctgttattgtacctgctctaagttcgatcgtggatgatcgatcattcgtcaaatgttaccacgtccagtgacttatccatggttcaccttactataaaaaatgatttttacggacaactcctttaattttgttcaaacggaccaaagaaacccgtatgtaaaaaggttgggaatatctgatcccgtatgtaaaaagcttggaatatctgatagagggcaaacttgtgaaaattgtttttttaagatagacctcttaacaagcctacttgcaaaaatcgacctatttacacagacggacttgttaagagacttgtctacgaaaatcggtggatagcatgaccggtcacaatacttcccctataattttttaatcctcctagataaaccctatctctctctccatgttctttgctttccatctatagtctcgcatccctcatcacctcccattcctctctctcaccccctgctcagtgggagcgcagctggcgatggcaccaccagtgacgaggggccagaggcctcgcatgtgcacggaagtgacaatggcgccacattattagcatgggagcagcggcggcgatttcgtcgggacacgctgcaattggctctagtgacggcacccttgagaggacatggtagcggtggcggcctcaggagtggtggggcacggtggcagaactccggcggtggcaagccaccacacagcgacagatccaccaccaccgaccttgggagtagcggggcctcagcggtgacgacgatggtagatcgaagctagggtttctattttttttgctgcaaaaatcactttttacacatgggtacatgtatgttttttacatacacctagtgttaggtgggccgtccacccgttcgcaaagatcatttatgcagtcgtcatgataggagatggaaccatggaggcatatatgcaagtatttggccaacatgtccaatgtccaccagattgggacgtcaatcctacccgtggtatgggtatattaccgtgcgcctgatatttacgtacgctggtttaatatatttttaaaaaatttgctacatactccctccgtccccaaggttggctttttttttttgagggagagagtaatatttagagtttgkggttttkgttattgaacmccttaaaaggcwtgaaacgayttktcggagaacgaatctcctytagcagggaagcaacgaacctcccaaaaaaaaacaaaaaaaaactcctcctttcatgattcaaccaaagggcaatttgagatcgagcctactttgtgtgatgaactcaaaacacaatcaagtatacttgtgtgatgagcggtgagccagatatgttcctgctctgtccgtgctcgactcaattcattgtcaaccctagcgatttccattaatgcaatgactatatgaaatgcaaagatgtactatatgactactagttggatgcacaatagtgctactatggaaccccttttcccctctaaataagtagcgcatccctaggcaaaatgactttccaataatcacagttagtaagggatgcatgcatatgcatgatatagtgatgtctgttaatcgtggcaaattggcaatgcaatttgttgttgaaaaataccaagatgccaatactacgcccacttcccgcgcgctctatataaagccatgcgctcccatcgcttcttcctcacaaactttccctcaatcagtcaatctgtatacagcaactcagcgatcttatatttacccaacacacc

SEQ ID NO: 6528 - DNA, 2000 bp, Oryza sativa
  misc_feature (1)...(2000): n = A,T,C or G
gatgcgcggattgatgggcgagttcatcgagcgcatggatggcatggccaccagcaccggtgagtaccatgaccgcatcggcagctacgcgctgcagctgcgtgaggcgcgcagcatcgccgacctcaaccagctgctgcaggaggtgatgcgcgataccggcaaggtacagcagcaggctgcgcaggcccgcgatcacctggccagcscccggcaggaagtggaacgcgcagagcagcgcattgccsagctggagcaggagctgcgtgctgctggtgacctggggsgtatcgatccgctgacccaggcactgaacccccgcggcctggacgaactgctgcagcstkarctggcgcctgccatgsgcaamaaattgccgctgggcstkgcggtgatcgatctggatgatttccacctgaccaacgaggcgcacggttacgcgggtggcgatgctttgctgcagcacctggtggccstgtgcaagctgctgctgcgcgccaccgacggcatcgcacggttgggcggcgacgagttcgttctggtactgccggaaacccagggcgccgacagcatggccaccgtgcagcgcctgcaacgttcactggggcaccgcgtgctgaccgtgcaggaccggcgcgtgccggtgcatttcagcgccgggctggcgcaatggcagcccggtgacgataccgagaccctgctgcggcgcgccgatgacgcgctgtatgcagccaagcggcaaggcaagaaccgggtgcaggcgggctgatgatccagcgtgcagacgctgtagcgcccgagcccatgctcgggcggcggcacgcagcgccgtagagcagccgagcgtgggctcggctctacagatcatttcccgcgcagcttctggaacccggtcaccgccgccagcacgatggcgccggcnatgatgccgaccaccatgttggccgcagcactgatcagccagccccactgcccttcaccgcccagcgcctgcaccgcgtggtgcagcgccggcacgttgtgcaccaggatgccgccgccgaccaggaacatggcgatggtgccagccaccgacaggaacttcatcagccacggcgccgacgccaccaggccgcgaccgaaagcggcaatggctccgcccttgcgcgacaggtacaggccgacgtcatcaagcttcacgatgcccgcgaccagcccatagacgaacaccgtcatcgccaatgcaaccacggccagcgtgaccacctggttggtgaacgacgcggtggccaccacgcccagggtcagcacgatgatctcggccgagaggatgaagtcggtgcggatcgcgcccttcaccttgtccttctcccacgccaccatgtccacctgcgtatcggccagcgccttgcgccgttcggcctgatgctcggcgtcgtcctcggctgagtgcaggaaacggtgcgccagcttctccacgccttcgaaacagaggaaggcaccaccgatcatcatcagcggcacgatcagcggcacgttccagccgcggctgtgcagccaggcctccagcgcgctgatcgccagagccgccggcaccaggatcaccttgttgaccagcgagcctttggccaccgcccacaccaccggcagctcgcggttggcgttgaccccggtgacctgctgcgcgttcagcgccaggtcgtcgcccagcacaccggcggttttcttcgccgcgaccttggtcaggaccgagacatcgtcgaggagggtggcgatatcgtcgagcagggcgaacaagctggcaccggccatgggaagtccagagagggaatgagcggattctgaccgataccggggcggctgcggaagcggtcggattcaccgcgtgcctaccgccccccggcgacactgcggaatccggacattgctggccagcggccggcacgaccgtctttgccgcatgggagttccgcttgagcaatccgcccaccgccaatggcaatcccccgctggtcaaaggc

SEQ ID NO: 6529 - DNA, 124 bp, Oryza sativa
tttggcsttcawttttttttggggattttttttgacctggatttktggcgcagatytgaggagcggcggcggaggaggaggaggaggagacggagggggagggtagggttagggtttaggggcg

SEQ ID NO: 6530 - DNA, 79 bp, Oryza sativa
  misc_feature (1)...(79): n = A,T,C or G
ttaaaaanmcccccccccccccccccttgcgcgaggctgcgggcgcggcggcggcggcgggcgacggcgagggcagcat

SEQ ID NO: 6531 - DNA, 2000 bp, Oryza sativa
atactggtaatgactaaagatttttaacaacaacatatttagcctatcctacaaaaatttgataatattattaacgtaccgaaattgtgaaaatgttcattttgatagttacatgaatagaccctacgtgaaacttctagaataaaatatgaaccacactatgaagctgtcaaagtttcagcctgattagacaaagtttgacctttcaaaatgatcaacctactgtacaagagacaagaccatacgtgcaatgcgtccatgtatctaaattaccctatttgctgtggactactccctccgtctcataatataaggattttgaatttttatttatagagtttgaccactcgtcttattaaaaaaatttcataatataagggattttgagtttttacctatagagtttgaccactcgtcttattcaaaaaatttatgaaaatataaaaaataaaaagttgtgcttcaaatactttggataataaagtaagtcaaaaaaaaataaataataattctaaaattttttgaataagacgagcggtcaaacagtgcaaacaaaaactcaaaatcctatattatggtacggagggagttctatagttacctgcctagaacacactgtctagaccatcaatgtaccagatacatccccaatcttagagacaaaagtagctagatttgtacaattaattaagtgaactactactttgcactactccagcagaataattagcaaaattctatcttccaatcaacttcgcttcagatgcgaaaaggcgacagcctttaagcctcattcaactattcaagccacttgacattctcataacagcacatacccatctgatgtgacattatgcaataaataaatttataattttatcatcaatactgtttcagatagcaatatctgtaccaaattgctatatgattctaagtccagcccagacttgggttgacccaacatgtgccgtccatccacggatttagccactaatccgcgcaatccaacggcccatatttcgtctcatatctggccagcaattgcagcaaataatttcatcctccctctgttttatattatataagtagcttgatttttctactaagtatatttttaagtttaattagatttataaaaagtatagcgatattttcgacagaaaacaaatctattattcaaatatattaattgttggttttaatggtattaattcttgaaatttgacttaaaaaaatcaaaacgaactattctaattaaatgggtttagttaattagtacttccttcatctcattttgattatcctacaagaattttgagttattctcaaattgatcatatctaagcagtgtgtctattcgcttactaggagcaattgctatggttgccatgtctattcggttatttgtacttgatcaaacttcttttaagtttgactttaaaagaatccaaacgattaacactaattacaagggtttaattgagtactattagattaacactaattacatgggttgcctctaattattaatcactcgcgcctcatcctgcggagaagagcgaacacttctccttctctctcttcttcttccctcatccccgcgcggcctcccgcctccgcctctgctcgcgagccacccatttcccggcgacagcggcctccctccgccgccgccggcgatctgacactggcgcccgcgccaccggccgagaaaggtagttccttttccagtcctgggtaacgatccaaaggcggtttctttttttatcttctcttgtggatgataagttcgaatttttccctttcatccatggcctcctgcgatttatgatctgttgcgagacaaatcgacacgggtgtttgtgggtttggtgtgttggattcgactgtttcttggcctgaatcatctcaggagaaggaattgaatttgtggtggtggcatttgttgtggtgttctttttaggggaattgaagtgtcataatcgatttgcaggagcagg

SEQ ID NO: 6532 - DNA, 2000 bp, Oryza sativa
cttcgccgctgtcgtcgccatcgccgtctttcgatccaagagaagagtaaagatgagagaaagatactacctccgtcttaatagtgtccaatatttaaccatctgtctcatttaaaagattataaaaaatagagtaaatttcacaaaactacatattttatggtccaagttacagaaaaccacacgcactttgacacttgtcacttgagtacatatattttggtagtgtagtttcacaaaactacactctcgatgtatagattcacccacgagatgatgtggctgtttcacctaggataagtatatggcatcctattaacagccatcgcacgaaattaatatgatgccacgtcctcatactagatgaaacaaccacgtcgtcatatcacgagtgaatccattcatcgatagtgtggttttgtgaaactaaactaccaaaatatatatatttaagtaccaagtgtcaaaatatgtgtggttttctacaacttgaaccataaaatatgtagttttgtaaaattaactctaaaaaataaaagatagtcaatataaagtattgtccacattttatcaactaataataataaatactaatcataacttttttaaataagataaaagatatatgaaaattcacaactgtatttatattaggacagatgtagtacgaaagaatcgatgtagagaaaaaggaaatgttcttctgattttctttatccaagcgtaggaaatactatcctttaacatggatcatttacatgtaaatccattaattcgggaaaaaaaagattaggtgagaagtcgatatttgcatgggaattaaagaaagaaagaaagggatttggtcaagggggaggaaggaggctgacgcgcgggaacacgtgtgagccagcacgtgaccacgcggcgaattcgcctctttccttccgcttccgcctacctcacctcaccttagctcacacgaccaagaactctcttcttttctgtcacttctcttccattcctgaggaggaagaacccaactgcatcttgcctggatactcctagcttgcagagtcttctgttctgcaactctgaagaccctgatcgatcggtgccattcttttttgctttccttcgtcaggtttgttcatctctgaacatgtttggcacaattagctttgatacatctgggataaagtttcatttcctttttgcagtgttcctgccttttctacctttttcgctctttgttcttgcgactaatggggctacagatcgttgatttatggttgccaaaattgactatgtacttgggaattcagtgcgcttgtggtttcttgtcagaaattagcatcccttgctcttgctggtttctttctttctttctgcagtttgtaacgagatgtaggttcagagcaattccaacagctctcctcttgtttttgtttcgcagcccatcttttttgggagtgtttgtttaatcagttggtgatcttcagccgtcctagctaatttgaatcgtttttgagtttcttgtttgcctagtttttgtgccgttttttaggatgctgttgcagagacgttattatctgctcctgtacgttggccgagtccgcgaattttggtgaaaatttgttctctcttgctccgtttatatatggctctttctgatcgccatctttcttctcatatcattttctcccaagagaagtaacctcggttctttctatgctttgttgcctagattgctacaacagaagtttctcagtggtgagcttgccttggtttattagcccacttcttgtttccccaatttattcacccaatcttttataactctgaacttttgagtaaatgtttgattatttggatatctttattcatgtaaatcatttcagatcggtggtagcggcaacaattgttgttgttgttgttctattcatttctgattttctttaacaacatgttgtgttgattccttgcagttcaatcgtagctctctgtgatacmaaaaaaaa

SEQ ID NO: 6533 - DNA, 370 bp, Oryza sativa
accccaaaaagcgctgcsamccaccaacggccgcggccaatctttcccctcctccgatccgtcgsttcgcccgttygccggggccaagcgcgcgcaccggaggaggaggaggccgtgacttgagtgaggttttctcctctcttttttttaccgcggcgagttgttactgtttcaccgcgcctccctcccctcctcccccgccttttccatttcgagctcgcctccctcccgtcccctccgtgcttgcttcctcccctcccccacctcacccacctgcccgtggaggcggtgcgcgagagagagagagggagttagggttagggttttgggttgtcgagtgggtgggtggggtgaggggagtggtccatcc

SEQ ID NO: 6534 - DNA, 2000 bp, Oryza sativa
actaagtactaactggagttttagtcctagatttagataaatgccaacaaaattttggagacacacatattcctgttcaatagaaagacatcaagaggtcggtttcttgtgttcctaacaatttctaggtggatgtaaacattgtaaaggtcatatatgtgttcttagataggagtggatttggaagaaaatgagtagacaatgggcgattggtgataagtattttgtattcggaggtgtgcgcttgacgcgtcaagaacattaacgaacatttagattccgtagaaatggccctaagaaaagacaaacacaaggagtacacaaacatttgtcgatgagatttgatagtatatttgtaccatgaattacaagactgactttgcgtagaccggttcactttaatagcacccaaagttcaccccgttcccatttttaacacttttgtcaattctcaatcgttttccgtccgccttggtcgctattgacagccacgtacgcgatatgacgtttttacccctcacaagtacaagtagaatgcatggcaatgaaagacgaatgtatctctattatgccatctaccattctcgtgactaactttctgccactggtcctcccctatactcatggttctcgtgtatgggctgaaacacgcgtgaagatgatttgaagcgaataaatgtatgtaattgattttgcatataaaaataattgattaaaacgttaccagtgcacatcgcgtagaagccaaatatatggtgaggtggaaaaagatatgattatctctttatatggaaacaaacaaaactatgcagttactttcgcgcgaaacggacaatacaccgcgcgttacacgtcagagtacgtggagaatgtgggagtggaggagaaaagctatgagcatgaaacaataccgtgagcatcgaaggaaaacaatgtggtgagatggcatgagtaatagcgtagaaaacaagccacattacacgagaagaacatttgcagctcggaaaaagaccaaaaggaacaattgattcgatttgcagcttatttttaaataaactgcaccatgaagataggaaaaaaaatctaaattttcaatttaaaaacaatgcaaagtatttcgacatcatagttaagggctaaggtacattaaaaatataaatatgacaatcctagcgacaagtagatattaaatcaatagagatcgaatcaaaatcgcattattcacaaaatatcatcataacttaaatcataaaatacacaatataacctgataagaaagatacatgagaaataaatgtatcaacatcaacgatcacaaacgttacacgaagccaaacaccaaacagaaaaaaataaataaaggaaaataagtccaaaaaaaagaacacaacacacagctatatactataaagctctgcaggacatggaaggagaagaaaaaaaaagaaaagaaaagcagaggagagagtagcagagagaaagaaaagaaaagaaaataaataaataataaaaagcaaaggaagggaaggaaggagagagagatagaatagagagagacacacaaacacctacaacaccaacaacaacaagagaaagagagaaagaagagaaggaaaggagaggaagaagaggtggtggtggtggtggtggtggtgtgtggcctccttcccctccctcctctcgcgaggttgccatgcctcccccaagatcctagaacgcatccccacaacctcacctcgctcgcaagaatcttcttcccaccatcgccctccctcgggatcgatccaacccgatcatcaatcggtaaaattcatttcgttcgttcgttcattcattccccatttcggtgccgaattgggggcgggttcttgatcggttcttgctagatctgccgcccgaccggggatcgccggggcgaggatcgggatctgattcgatccggtgggggatcggtggttgttgtttgttttgatgcaggggcgggraagragragragggg

SEQ ID NO: 6535 - DNA, 2000 bp, Oryza sativa
ggtgagcatggtagtatggacgccaatgcctctttcgatggctcttcacatgtggaaaaactttggcctttactgagagcctaacaatcatcagtttattcacaagtctttggtgattctttttccagttttgaaactgctcgaggactttaccgagctagaattcgtatataattaggatgaaaataatttgtacgacaacatagcagatgcaacagcagccgcaatatgttttccaaacgaaaactgcagaaatctgaatagaacagcaaatgagacgtttgtcggcattgtcattgcaatctgattacgacaacagcaaattagaagttgttgacttgataagcatttacgtcatccgtcttaccaaacctgacttgctacaactaaaattatccagttacacgcacagggaccggacaggaagggtatgaacaccttcgtcgtcatttttttcaacggatgctactgctagttgaacgagttaagaagtggtcttttgcagtagatagtatagcagataaatagataaatatcattatcccagtatcaatcaagtgatcaacgaatcctgcgaccatttctgacgaaatgatttctggtaggatttctgactaaatgatttttgctaggatcagcgttgctcccagtcgtcaactggtgcaatgcgctgtgcgcatcaccgcagaaatatcccggtgagatacaaaagaaatcaacgacttgctcaaagtaaaaccaaagcgaatgacaggacaaacaaattgacagcgctcaccattgtcaagtgccaacgacgcgcagctgccaacaaaccttcattaactagggggtggccactccctctgctttcctacgtactccagcgacgagttctgttcaggccgccggttgctttcatccgaggacactagggccgagcagcagagtaactggagtactggacaatctatgcgatgacacttcagtagttcacagcatccaaaatctggcaaactgccctactaattatggtcccataaacctccaataccagcgaaattgcaataacgatcatggtccaagaactagcggctaccggtcggagatgggaccttagctagttattgcccgtaaagatataaatttatttaaaacatttaaaacttagatttaaatttagaaatttatgatataatcttttgattccattctgaaccgtgcgagcaattaaaaaaatgttcgattttgacccggacccatggtgcggtgcaatacaacatcgctcttgcagtttgattgctgctctcgttggttaattaacgtgggggcatatccatccatttctaagggataaagcctcgatgcgtaaccaagaaattactaactttcataaatgcgggctatgcatatgcctatatatcgggggtgctgcatcgctactgaacgggcttcacagcgacatgagaccaactagtgatagacctaaagctaaagcgatgataaagacggatggcttcctgctgaagcaggcagatcaaagaaaatttcagacctgattcacatcaacacgcgagagagaaaggatggaaatgagcatcaggtctttatatagagataaaagttcgtcttctttaaaatctgagaaatcttgttgactagcacttccgaaaaacttgaaacagacattattgtcacgctgaaacttactgccaccaaaaacttattgtcacactgattggatacaagtcgcggtttgtatatcgtctaaaatccaaataaactgtaaaaaagtagtccattggcacgtaaacatcgttgaagaagccaatgctgcatcatgccatgaccggctgacggctaatacataacttgtggattcatgatggccaaacaaagcttggcccttcaatcaatgccatgacagatacctatgagtactatataggaggccaacaaacaagttaatcactcttcgctaagtaagtaagaattgtggttgccactcggcactcgccacc

SEQ ID NO: 6536 - DNA, 242 bp, Oryza sativa
attttatcacttaaagtattttaaatattatttatatcttatatatttacataaaatatttaaataaaatgaatgattacgaaactcaacggtgtcgtctgttaaaaaacggagggattactgttctactataactacacaagtgttcaaccggcgtcagttgctcttaaccaccagcgaagcctcgttcctgcgcgccctagcgtttgctcatctcaggagctcacgacgcgcgtgcgcat

SEQ ID NO: 6537 - DNA, 2000 bp, Oryza sativa
ctgacatgttgaaatatagtgatgtgtatggctgtacatagctgatactccagctgacatgtatagcattctgccctaatccctccgtaaaaaaaaaccaatataggattagatatgtcacatctagtttctttttttttttttggacggatagaataccagtaattgtttgagcccccattttgaattttactgcccatttatccctttttattttccatggaaaaaaatcggactactacaaataaaagtataaagatggaatctcgaaacaatttttgatttctgcagtaacttataagtgacaatcaccacaaccgtattagtaaccgttcctaacatgatacttttacctcgtcgacaacaaattggaactatcgtacccggcatgttcggttgccatactatagttctatacaagtactgtactagtacagcgccaactgtccgtacacccgccgtgtccgaccaccgtacaaagtacaacgccgatgcccggagagaagcgatcgagaggaaacaaacccaccgggaccaaccgaccgaccaagcaagcaagcgcccaaacggttgggttgggttggggcgtttgggtacgtgatgccctgattccgaagccaccttgcagcagcacgctcccattgaaatcgaccgaggattaattccgttccgtcgaggtggtacgcatcaacgcatggataggatggagatggaccagcctcgctagccgcatgcgcatgcagatgcagtgcagtgcagtgcaggcctcctcctcctcaaaacatacctttcctttccatccggccgcccacgcaaaccctcctctgcacatgcgaatatgtgtgtgcactgtacagttaccgggttttttctttcttttttgatgcaattatgcagagggtagtcgttgttactgcacatattgtcgttttctgttaattctggaaatgggtagaagataatgtttctctttggatactgacgtgcaawttgatagcatagcatggataatcacttgtgctgattctcactcccactttgtaacttttgatcttgatcggtagcgaagtttgtaaatattactagacctcttcatatttgagccatttgattattctctttttttggagaggaatatttttatacaagagtaaattttagagaagtgtaaattttaatgtaacctatcggtttgctataatcactagagatccaatatgtacaatgacaacattcgaaattatcaaagaaatataatttcgttagcgcccttatcattatttgataaaccgagcctcatatcacacatactttactagatgtagtgttacagtatgccacgttcatcatgctacgctattgtttgtatgcgggcacaatgttggatgacacaacaacatgtaaggttagaaacgatatgttttatgtacatgcacatattttgtgtaattaaaaaatactagtttgtaaaatgtaaacgtgaaggaaaaccattagcacaaaattatgtttcctaaacgttaaaagtcaagaggtaaacttgttcaaaaacttccgcgacaattcagtactacagtacgatcatcctccacggttgagtgacttgaatccgcggcggtttgatcgctacagaagcaaccgggcccacaacccagtggctcaacacacagccaaaagcagccgtaccgcaaccagagccccaacacaacaggtcaaaccttggtctcccccatgtttcaccgatcccattaatctattcttctcgtaaaaagtaaaaaaaaaaattgtttcgacccatccactcccactctctactcagctcatcagctactctactctcccacttgcttccgctgcttctcctctccataagagcacccaccaactcagcctctcctcccatcgccgccgccaatgccggcctccacggcctcgccaccgccgcacctcgtctgaacccccgtcttgctgccgccggaaaccgcgtcgagaagttaacc

SEQ ID NO: 6538 - DNA, 2000 bp, Oryza sativa
accactttcctcgccggcttgagctcgtcgctgcgcggamaccctcgccgccacggacagctacctcaaatccatctcctactcacctttttttttcgccagattcagaggttagaagctcgggcctgccagatccgagtaaccacaacaccctcccggccgctggacccgctgcaccgacggcggcgaacatgcctagctgggtggcacgagcggctaggtaccggtggcggcaagttcctctgcgagctctgttctcctttttttttctttcttttttccaccgaatgtcattaaccactgataaatatggtttatgtactgctgtgcaactgtatatgctcatccgatactgttttcaattattgttgtcaggagctccgaaatcaatgctttgtatattttgcatgtactattaaatctgatatatataccataaataaatacgctttttatttcgtagatggtaagaattttcaatattaattctaagtgaggtaatctctccttcaaagaaagaaaatacttatacctactatccatacaaccaaccaaacaaagtctctttcaagccgtatctttggtgcaagcagccaagcagaatctcacgctaacctggctaaaccaatacaaccaaccaaacggttgcatatgtatctacctagccaggccaaactcagccttgatggaagagatgggccaagctaaaacaatgcaagcaaccaaacacaccctgattctgagaagccaacttctgagaatctgaaaaagatatgttttccagtttttgacttctagtttacaactacagctttagaatctagaaaaaacttagactgtttggggagcttctgatttctaagagaagctgcaacagttagaaactcccctaaactggtccatagttttcagtggtcaaaagtgagattatacatgaggttaaacaaataatatactattcattaatacttggagagaacaaggagaggagaaaactaggggaatgagagagtattattagttcgatggttaaaaaaatwaattaaaagatgaaatagtaaatagtattaaggaagaaaaatattttttgtgagctaaaattttaaactataattagattttcttttggacaaggagattagagattaatgtttgggaaagactctgctggtatctctcatttacggaggaattgagggtgattggataagrttaaaaggaagrttatycaattggccaattatactactctctatttaagatataatagtacatagaaaaatagggttaggggagtataaaaaaatcttaacatttgtgaataaacatwacacacactaggaaaaatgttttactatattagtagacaaagtggataagcctcaggagatatacttgatagtccagtgataaaaagactgtggtttcaaccttaagaatcctcaacacgattataatttctttttaaaaaatatttgaaggggcgtttctctctatatattttttttattttttagcgtaaagccgtaaaacctcaggctgcgagctatgggcaggctcaactgaaggcatggccaggaaccagggtcaaaggagcaacaagtcatgtccggtgggccccacccggcccaaaccccgggggacaagtcaatgagtgcccccgctccctccgaacaggaaaagctgctcatcatttgcgctgcgacgctgacgcgtgcgcccattccacgcaaaagaatactcgcagcccatgcatgcacaatactactactactagtattttctttgacttttcctgcaccccacaaaatatcgcttttgatctaatctcctccttaattaccccctctaatcaagctcccctgtctcccccacgctttaaaagcttcctcctcctcctcgccaaccaccaccctcagtccctcacctccatttccatcaagcccaagaacgaactcaccacgctagtgttgagaagtggagagagttgagaggaatca

SEQ ID NO: 6539 - DNA, 2000 bp, Oryza sativa
ggtgaccagttgtctccaatgcatttgagagtgaggaacatgtttctgacaagggaaggggaaaaaacagtgatgagaataatcccatattgggaattgctacaacattaccaaataaagaattgaaagaaaataaactttaaaagatctaataattgccttcgcccccaaatgatagaaaaaaaaataggccgttggatggagatccgatgatccagatacatttaatcttgtaacaaccctaattactagtccacctcaattgttttttgttgccaccaccatcgatcccctacctcgccgccgccagcagcaacaagtccgttcttccccgggcacctccctctcttactatcgaacaccttcttctacttctctctgaacatcctctccaacaacgttgttttaccttttctcttgttgtattgcctttagatcaaccgctgtcgtagcatcaatcacctcgtaatcacaaagacttcctccgcctcctccctgtttctcccctcactcacccacaacctcatcttgtagagccttactctagccaacttcgccacctccaccaccgtatagcgagaaagccatgataatttgggttccgtggtgtatatatggcggagaggctgcctaaaattcacaaatgaggataagagcaatggacgaaagcaggaaaggcagccagccttttgcccttttataagcaatgacggtttgtaccgacctaatcgtatttctaaatgggcctaaacatatatttgggtctaaaatagtcgctcccgtctatcacattaaggctttatttggatggtcgacatttctatgaccacatttatgggctgaagttttattgaatttgtcgccctgtacacaacacaatagaaaaaacttgggtttactcatattgtagccacctttcctttaaaaatgttctttatgaattttcaaaagtatttcggtttycwatttattcckgatgaaattttatacccaatataaagttacaacccactaaatctaaaactcgacatgcaatcatgccacaatcaattattacatatcaaagctcatgtaagcatgaacatcatctacaatctactgaattctacaaattaacaagcaagcatatcttatcatcaccactcatatcatttccacaatatttcaaagtatctatttatcatttttataatacttaaaacatatatctatcaatatattcagcatcaaagcacaatatcatttgtttgtttcatgattagtatcgtaaactctgacgtttcattattttttgcattctgcttcttgcaatacaaatcttgatcaacaatctaatattttatctattgaatttatttctctccaaatatatattagtaaaccagtttaatttgttgttaataactaatatcctttttactcctaactcgattgttgaaaaaatatattgaagattgcttcgtaattcccacagcaaagcgcgtgtggaaacacataattaaacaaaaagttgtatccacttgagccgtaggctacaacagacagatagtaaagtctctacatcaaagagcgtctaaaggtatgcatggtccatactcattttatttcaaattgtttatcattctagtaaattttatagcaaataaagagctatggcaaattacattattccccttatttatcagagtacattccaatcatttttcaaagtagtcattaactctgattactaattgtggctgcatatatagggtagggagggaagatcacatttaaagccttgggacatgagagtgactattttagttaaaaaaaatgaattgctaataatatgaaatggagggagtaattgaatatgccttttgggctgccatctgcccattgggctgtgaccatccggtttgagcccattttactgacctgtctccctgggctttgttgcgcgagcacgagccatggccgacgtgggtgggagagctcgagctccgaagatggcaaca

SEQ ID NO: 6540 - DNA, 2000 bp, Oryza sativa
aggcccttcaaaaagcagtagaaattcgttgatatcaaaagataattattccatcttaatgggataaactcaatgtagttgataagaatcgaaattacagaagatgcaaacgaatcaacaaaaaaaatgcatatttaatagaaaaaaggttgacatcccaggtagaggatggaccagtagtcacctgtatggaattctgcctctgaaagtatattgaagagcataccagatagggactcgtatggtttagcttttggccaggcccacaaagatagtactaatacacaaatagccctgaaatttctatttcctcgtgtccttcaaacacgtgcaatggcataatgatggctaggcaacaatggataactaatgcatttatcattgctaaattatagacaagttcaacatagttccttttttctggaaaggtttttaaaatagaaaatgagtaacattggacgttattttacaatttaaaaaaatgtatagtttaccttcaaggaaaagatttaaccagtatatgattgtcaatgactttgacatcaataccagaaaatttcagaagatgtycgaaaaaagtatccccggaggacatcatcctaacatcaaagtaggcaccacttattgttgtcagccagtatgccatagtaccctgcatgacatgtgagcatctgtcaggatagcaattagcaagtgctatatccagccagcaaaatcattacaaaagtaaatcatacgcttattattcagttataacatcgacaagcccaacaattagtgtaccaagaagaaggttttttcctttgtctagaatataacttcggggtccattgcaaagcacaagatatgaagtgggtaccatctgaccaagtactggctgattcaccaagaacgcgatacaagacagaacttcaaataagattgtaaacaagtgaaacttttgccagagatcacaataatggagatacagtctgttcattcctcactggtcccatgaaaacaggcagcccaatcagtgcaccggataaacactaattgcagcaactggtaggcatcagaacacggaggctacttagactgagtgactgacaagagattgtggatgatcttattagccattcatctgctttaattagttgagatgaacgtagagaatggatccttcacccccactaaaacaaatcttagttgaacacaactaccaaaagaatatacccaacgattaagtccattgcagattactggcagaaatgacatccatgattccggccgtcctgttcacatttgcacaaacatgtggatggcagtgctaagaaaaacatatgtcagaagtaaatttgactgagattaacagaatgccacttactgatgcacgagttctttttttaacctttgacttgggaaccaatggctactacaaaagtaacaattatgaagaagcatagctatccagaaattaattactagtcacaattgccacttcagcacaaggactggatgcacaacacaccagcaaaacaatacacaccacagactgttcttggttgaatcgaggagagcaccagtccacagaaggagcctgcacattcaccagagcaaatggttggagaggagcctgttggttcttgctcaacagaaggcattcgcaagagaatctatccttgcagatcagctggaaataaattgcttcaggagttaatttgactgcagctgatcatctaccaaaagaagtcaactctgtctcgtgatagaatctgccgacttgtcttagctaacagcttcccacatctcccatctaaaacacgcatgccctgtccgttgttttcctcgtaaggtacaggacacgagcagtttccggttcccttctttttaaaattcctcaccttgaccctgcatgttcatcatgtgcagcatacatatatatatatatataaagacccagcctccacaccctctgcaaacagagttgggtggccaagaacaagaacagcaaagcaacc

SEQ ID NO: 6541 - DNA, 2000 bp, Oryza sativa
attcaaattttgagttgaaagttttcaaattttgatttcacgtatagatttcttttcaatttgctacttaaaaaaatcttaaaaaaaagacaaatctacaaatcttaccttaattatggttattatcgaaaactaattggattaggtacgcatcaccgaaaaaaatccaaaaagaaaaaagaaacagcaccaaaaaaatcccaaaaaaattaatccctccgtgtgcgcgccgcctacgcgcgcgcgagttagctttctcgtgaataaagagcaacaccggcttcagccaacaggagtagagctattacctgtttgataagggatccaaacctgtataaaaatacttgtctccatctctttttctttaatctcgcatataccctggtaccgacgatcttcatatcatgcaaataccgtagttgaaacctcaaacgtcgacaacttcgatattggaaaatgttaaacgatcgtataaaacacttaggctgcgttctagaggatcccggcacgtaaaataaagcacgtattattgcatgattaattaagtattaacatttttttaagaaaatggattaatatgattttttaaaacaattttcgtatagaatttttttttcaaaaagaacacagcctttaacgtccattggaagattattccaagttaggaatcatatttcgatccgataagaagatctatacctaatttgaaaaacctacgctgctacggaacatctagactattactcctactaaactggagactaccaataatgtctctatgagtactcgaatacaacgagacataaggtataaatatactccctccgtcccaaaataattgtagttttacactattcatgtttaacgtttgaccgtccgtcttatttgaaaattttttatgattagtatttttattgctattagatgataaaacatgaatagtactttatatgtgactaaatgtttttaattttttcacaaaattttcaaataagacggacggtcaaacgttgaacgtgaatagtgtaaaactgcacttattttggaacggaggtagtactactttcagagggagcttaatagagacaacaaataaaaagagataacaacaccgaaccttcatcaaaccctaccaggattaattcctagatccgtacagtgcctaaggtgtttgactcccaatcatccgaccaccgtctcactgtaatttctaaagagaccaaaagataggtataggacaatgtcgaaggccgtgtaataaaattgtatatctaatatttcaggactaagggaaagagtatagaagtccatggagattttttggttataaaagtggcctgaattttgatctaactatactactagcattttggtcttaggccttagccataaagtaccttcgaccaacaattcggcttccacgttccaaatggcttgcaggcaacaaagcagagctgtaccagcccttgcacattttcttcctgctcatgcggtcaagccgttctgttatggtaccatctcatgatcgaatttcgccggacaccgaaaacctaatccgtctctgcatgcagagcacaaaataaatatgcacttgcgctaaacaagctcgataaatacagcgactttcacaaaaggctccacacacaaataccaaaaagcatgacacacgaaaagctatgcgagggacccacgccctcgcgaaaattaggtagccaccagagcttttttttaacgcaaagcactctatcatgatgagaagatkagggctgttccatccattccaaattccaaagtgcggaattagagatagccaccgagacgccttggatctttctgggtgaaaagatgggcaccaaccctataaaagaagctttccctcttggcatttggaacctgagcctaccagggacagacaaccaccgcaaattggagggaacggagcagaaggtagcgaagcgaaccaagaagtcttcagtattccttccttgcaagcatcgtta

SEQ ID NO: 6542 - DNA, 2000 bp, Oryza sativa
aataaattggaaaaaaaaatgacaggttactgtcctgtttggatccctaacgcttgattttttttttctgaaacagatgaggtcaactttgttcggcatgaaatccttataggttttagtaatgcggcgaagcgatcgactcaagtttgtggtragtcgaaaatgcyccatacaaattggaccccctagtggttgatagagascgagaaagaataaatattyctttcaaaattatgatgcgaaatyttaacyctgtatgtttatycttaactagttaaatatggagtaaaacttaatatggtagcaaagccagtgatcctttatttagcaccgtaacacaactctattcaatccacattttttttaaaaaaaaattaaatwttwtaagatgtatatgtctgaatttttctcaacttagattaatttctcattttaaaacagccatcattcttttccatttcttctgacagctagctgtgacatcctaagaaaatttactcatttatattctaaaaaaatgtttgttttagggcttacaaattttcatgtgagtaccacaaaaccatcagtaaattactattttgtactgcaagggcgttagtagaattttttttttaaaaaaattaattcaggatagttggagtgctaattctcaagcacttttagtcaaaaaaaaaaaaaatttctcaagcactccctgaaaatgagggtcacggtgcaaaagagacgcttgacaaggtgcaaagtgtaaactgaaggaacgttcaaccggttgaaagctctgaagtgacccaaagtcacaaaagaaacttgaggtttcttgggcaaaactctcaaaccaaaaaaaccccgaatttctcggatttatgggacccactccataagtggctgctctagatttcggtatatatattagagggagcagtgacccaacctgatgtgttcatcaacaaccgtagccacatcgcgttccaaaacaaatttcagagaattatctcagctctcagaaccttcggctcttctttgatctttctctgtccctttgggagaagaagaactccgttcttgcttgcggtggctaatttcagacaatcaggtgaggagcttggtgttgcctcttttgcttctggcaaattttgatccaaatcttctgttcttgggctgggattcttgctgtggattagaattggtctaggatgtgctgctggatgcagagttccccagtcaaaatgttggtctttgatgccattatgaaaatctatcaactttcgcagtgcttgatgtgatgcacaccaaatttcttatcaaatctatttgcctcttcttggttttctctttcttgaagaacagcaaaagtctatgcgtttatggaaactttgttctgatgccttcctgctgttcaattctgaagagctgttcttagtttgcaccttcttgagtttcccctgtttttcctcaaggtaagttcagagtaccaaagaattgggcaaaagaaaaagatagagagttgctgattcttctggtctcttggattctgttcagctggatataatgcaggcaactgtgaacgttttttgtggtgttgaatgcagcaatcctgattgaaaataaaaaaagagaagcaactgtgctgtaaaagtgcatgtttaaaaggcatggctgctactaactcgcaatcaacttttttttagtgctgatgtagtgctagttgcagcaaatgcatgaacatcgatttggtcttgagtcatttgtgccggctaccggttgttacttagtgtttggttcttctctctgactttgaccatatcacagcgagctgaattattcgtcttctctctttctttgtgagttgtttctgatgactgtttcagctgaaatctaatttggatattgatttttccattggcagagcagaagatttcagttgtatgggattgcatcagcatgcatggggtgaagttggcatcgagatcttcagcccaaggtccaagcatatagcc

SEQ ID NO: 6543 - DNA, 2000 bp, Oryza sativa
acttttttaagtcctgttattttaatgtataaccctgtggattctaagttattgatacgagagactgattatctcggccagggaaggacctgttctggtatacaaaagataagaaatctgactcagaagatgctctcaaggaagaaatcaggagagtgaaggaagaggaggagcagtccatgcgggaggcacttggcttagttcctaagcgtagtagtcgacctaagggcaaccgattagataagcatgagtacgcagagcttattaagcgaggatcaactgcagaagacttgggtgctggacatgctgaagcagcacaagtgcagggtctaggtttatacaagtaagttcatgctgcaatagtttcaaacccactttaaatcatccttattatatagtggtcatataatcgaacttatctgaaaagttttttctagtgatatttgatgaattactaataatataatcataatgcacattatctcaggggtcctcgcagagaggaagaatcgagctcctttaaccttgatcctccagaaatggtgcccgctgagcaggctgacaaccctccaccggaaaccaaaccggaacgtgaagattccgatgatgatcgtaggagcaaaagggggcgtgaggagaggggaggggagaaagagcggaagcgagaaaggcactcggaaggaaaggagaggaggcgtgacaagcaagagaagaggagtcggcatgagtcggacgacaggtcgaagcgccaccgcaaagacaagcacaagaggaggcatgactctgattccgactagttactgcggctctttcaacctgtctcactgtatcctgccatcatatttcatgccttgctacgtttgcttgatgatgatgtagttgtaaaaacagcttgtatactcttcttgaatacattgtctgtttttaacttgcacatgagaaatatgttgaacctgtaacatcagcggtgcattttggcaatcttctttctgcctatccttgtcttgtgcatttccatcttcacgggatgttaagtgttacggtgtgtagttcacatcaaaattagaagtttaattaaaattaaaacgatgtgacggaaaggttactccctctgttccaaaaaataacaatcttatactggatgagacacatcctaggacaacgattgtccagattcgattcgttgtattagtatgtgtcccatatagtataaggctgctatattttgggacggagggtgtgctctgcttattagttatttcttcaacgatccagtgaaaaccattcttaaatttaacaaacgtttaacacgttaagcggctaattatccaaccagaatttcccaggaggaacacgcagattagcaaaggaaaaataaataaaactagctgagtcaactctctctgtcgtcatcttcttcgtgtgtgcagtgtgcgagtaactcgactcgacgaagggcaaatacgtaactttctcggcaggagaggagttgggttgattcgcagcaaaggcacggcacggcacgcacgcactcgaattcaccttcaccttcagcgcgagccgcgagcgagagaggaaaagggaagcgacgatctctgcccttctagaaggttcgcctcgtcggtccccttccccccctctcctctcaagcttcagagccctctctctcccttacacgaggcgagatctgctccccttctcccgattcaaccaaccaccacctcatctccgattccccctcttcttcttcttcttcttcctcttcttcttggtggggttagtttctgaatcgtctctactgctaacctccgactctgatgccgcttcctcttcccttctctcctaattcacattctattcggatttcctttttgagggtactctagtctcactagtggagtgattgattggttgattggtgttgttgttgttgggaacacaaattagggtttgggatttcttgactggacgacctcgtgcgatttcgggaggcaggagcc

SEQ ID NO: 6544 - DNA, 2000 bp, Oryza sativa
cgcccagtagcattcctgatgaaaatagacgtatgagatttatccacatcacaattagtaaaatattcattcctaaaattaactattatgatgtagtagaacagaagtttcactactgatgatgacgtgaataaatttcacacatctattttgtatatcttatgatagtattaggtttcgactatatttttgtagtttacaagctaaacttttctctaaggtcgtttgataatcattatagctcccgaatgtcgtgacaaacataattttgacgcgtcgggcagggttagttgagcattgagtgcttgtcatggagaaaatgactcagggttcaggtggcccccattcttctcacggattgagcttcatttagttgcatgcatgtagaccactagactactccatctgtcccacgatataagagattttgagtttttacttgtaacgtttgaccactcatcttatttatttttttttaaatataaaaaatgaaaagttgtgcttcaagtattgtggataataaagtaagtcacaaataaaataaataataattttaaaaaaaattaaataagacgaggggtcaaatgttgtaagcaaaaacccttatattatgagacggagggagtagttgtacagccaagtagccgacagccacccactcggcatgagcgtctaggcgcgstgacaacttamtccacattaagaggagattaagagaaawtgaggtatagtgcaaaccgttctacgagtatggcctcgatcacaactaatgaagatgaaatcaagttttaattattataaacttaacaaatactctctccgttttttaatagatgacgccgttaactttttctcatatgtttgatcattcgtcttattcaaaaattttatgcaaatgtataagatataaatcacacttaaagtagtattagtgataaaacaactcataacaaaataaattataattacgtaaattttttgaataagacgaacggtcaaacatgtgagaaaaagtcaacggtgtcatctattaaaaaatggaggtagtatatttttaaatatggcatcaggttttgaactgatagcaggctcatctattgactattacagtgggtgaaagctgttggttatgatgtgggactgcccagcatttgctcctcaagctttaaacaaggaagacttggttgcattctgaaagaaaaagaggtcaactgcagcaggtcacgcggcaggcagagattctacgacaaagcatcgctttactactggagtatacaggttttcaggagcacttgagttttttcttttgagaacggagcaaagttgtatgtgctgccatttctcggttacaggcaaggaaatgcatagaagttgcattgctctgtccttgtctctgctctgccccgcgcaattaactctgcaccctttttttttcctcgcttaattctcgactgtttgtgtaattacataagacaaaattgctagtagatccaagcttaatggcagcacgtgagatactattgtaccccaatcaaacctaacacatcttaacaaatcccatttgaaggaaggcacataataacagcgtgtttggagggttttgatcaagtggccaatgcagaagtagttggcagatggtgcctactggctagaattcggcgatctaacctgaaaacgaactgaaatgcgcatgtgaagggagtagtttgagcgagtgtgattgttcttgcaacaaagaaagcaaaggtaattaaggtcgatggaatttctcagattaaatggcgctttaaaatggagatgggtatggtaggcaatcaatttcccgggggaaaaagaagaagaaaagaaactgacatgtcgctaaaaaaactgctccgcctccgcgtcccccggccgcacgcgtcgcgctctgtgctgctataaacgacgagagcctcgccgcgcactcgacgcgcatcttccgaaatagagaaattgccacggatcgagggcgaccgata

SEQ ID NO: 6545 - DNA, 2000 bp, Oryza sativa
gggggtccaggtgggggcggcggagaggaggcggagcagctcgccggcgggggagctcgggggttgagagggtggggagctagaggagaggtggcgaggcgtgggcgtacgtaggatgctcaagggggcgaggagcgggcggcgagtcgccggcgtccgcagcgccgccgccgccatggggagagagtgtggtaaaaccctagccgggtttgggtagtggggaaaaaggtaatcccgggctttgcgtttggcttagcyttgggttttttgggsaaaaaaaaaaaatttaggtttacttgtaacatcggatatacgaacatatatttaaaatattaaacataatctaataaaaaaataaattaaatattctgcttgaaaattacgagacgaatttattaagcctaattaatccgccattagcaaatgtttactgtagcatcacattgtcaaatcatggcgaaattaggtttaaaagattcgtctcgcaatttgcatggttttttttctatatttaatactctgaccaagctctgctgccaagaatgcgcctaacctgtagcaccagtccagtgttcctaaccacttcataaaaatcaatcgaggagtgtgactcaaggagactactagaagatctcgggcattggcatagaaagggtgataatggagtcaaagcacaaatattttgtcaaaagagctagggaagccaataatagagtttatatacaggatgatcaacagtggacctaaggcgtagggtaaccgaagcgtgggttggtactcaagtgtagtaaacatgcaccgaatctcaagtatgagaggctggcagttggtggcataactcggacttgagaatgtcagtagatgtgcttgagcgaattgcgtactagatcaacgccgcaactcatgtgcaagaaggagcgatggttcttaatattagatatttttttggaacaacttaagtgtcatcttctcatatttttgtattttgagcatggtaaataataactcatgtttaatgtttttatagtaggttgcttaataatagcataaacatgtataaaactagttgatacgccatgcatggtagcaggaagtttagaaatacatcgaagaaaactcgaagaaaacaaatctataaaagttgtatttgcaaatctatattttgagctgtgtggtagttgatttggaattggaattatatatgacatatggatgtatgaaacatgagaggggtccaatggatattacttttttaagtgacattgtttaatacatattgagctttattagcaaattgcaataactataataagtggattataaaagcacatgacatatggatgaataagattaaagcatgagagtgatccaaataccactattttttgaggatttaaaacaccagtataactatctgtcttatcggttatctgtactgcgactacgatcacaattacaaccgtgcaataggtaagtagcattcaatgaactataacaaaagtatggtccagtcgcagcctacgcagttgattagggtctatacgcatcgaaaatattactttcgaacaaaggtaagccttaccgattaattcaatcctataaattatatcccaatttataattcaaatactcctgtatatgactacttccagataagttccctccagaaacatcaaaacaaaaatcaaaaatcacaaacccaaacccaaacccacaagaggagaaaaaggtgaagcaatcagtatccagtacaatcacatcaactaaacaacaggacgagagaagaaaagcaaccagaaaaggcggcctctgtacacccacactccgctcccctcctgctgctactccagtccagtccagtccagcgcactcctcactcaacaactctccctcgatactctccccccgcaccaagaaaccacggaatcctcctcctcgatccctcccaatccccaatcccagcatccccgagatccgcctcccagcgcgatcccaacctc

SEQ ID NO: 6546 - DNA, 2000 bp, Oryza sativa
cattaccttcatcttttaaaaaaaaatcaaattctaaaaataaacgcagacaagtgtttataattggactttttattgggacagagaaaatagtccttctccttattcgctagggaaaatgatcatactgtttgctatcgaataaactgggactacctgtacttgcagttggttactgggagtcatctgggacattacgaatcgatcagtactgttcctagatctaggctagtggatgcctggatggagcagagctacttctagtagcagcaaaaagaagcaatacacctcttcacctctaccatggcggcgcaatgaattcgcgtggtcagaatctacgggcggtgatcgatcgatctaccaaccagatcgatttgtgacgacgccgctgctacttgcatggatgcattgcatgtggggtgtgtgtcctcctctcctttgacagatcgatatccatctttttttcctattctgcagctagctcacaagtctgtcaggtttgatgtcttgcacagttgcgttggtcgattgatcgatcgagtatttattggagtggagctagctagcaataacttaactatggaaaacggaagaagattcagtaagctcgacgggaattgtcggcgagttattagctagggaatttgtcgatcggtcgctgagatcatgtttttttcttccggtcagtgagaaattctgactgaaagtctgaaaccattcatgtcgtctcaccagctactaccagcactccagcagtaaaggaactggaaatccccagcctggaagttagaacctgtgtaacaagcgggccgtgttcttgttctttgttctttttttttttttraacggattgttctttgttcttcacaaaatgctcgkgggtcagcagcaacttaacacccagctgccaacttccaacctcatgcatgcattggcagtgttttgcatgttgccattttttattttccaggagatgcgcagtgaagccaatctccattattactactactgaagtaaaagtctcttcagtgaaatacctgtactttgggtgtgctcgaacgtaatttacactcaacctgtatgtgcttcatagttaattaattggcgacattacggttccagaatttccagaatccagatgctgattggtaaaccaggcctcatgtacggatttgcgtaaatactttacatttgtacatacatctccgtcataaaataaatttacttttgtatatgaatctgaatatggctatagggggtgtttagatctaggggtataaagttttggcgtgtcacatcaggtattataatatacattgtcgcatggggtgtttgggcagtaataaaaaaaactaattatataatccgtcagtaaaccgcgagacgaatttattaagcctaattaatctgtcattagcaaatgtttactgtagcaccacattatcaaatcatgaagcaattaggcttaaaagatttgtctcgtaaattagtcgcaatctgtacaattagttatttttaacctatatttaatactttatacatgtgtccaaacgttcgatataatacggtgtaaaaatttttgcacgggaactaaaaaggccgtagttggcgtatgttcaaatgaaatctgaatagtgttaactagctagtactagcagacactgccagtgatgtactgaattgtgtgaactgttgttcgatcgatcaatcagccaggtcgtaagcttgcaattcacacatggtacagtgcccgcgccgcgtggaagttaatgctcggcccaatggcgactagcttgcaaagagcccaataattaaaatccaatccatttttcgctgctgctgatgcggcctgatttaattcaatcctactccattggagccaggagacgatcgacttatatataaatgaaacacgttgtgtcgcattctatctatctcacactgctcttagtgatagtggccagtgttcagcgtaacgtgtctcgtcgtcgtcggaatta

SEQ ID NO: 6547 - DNA, 100 bp, Oryza sativa
tccccggcaagccgctggccgtcgcgcagcgggagtcgctggcacgtgccggggcaagcgtcaacagaacgcacaggaacagcacaagagggggcagacg

SEQ ID NO: 6548 - DNA, 2000 bp, Oryza sativa
attacaactcatgattttcttaaaaaaacatatatcctagcgaattcccacaattattttcaccctagctaaactatataataataataataagactaaaatagccttcacccgttgcaacgcatgggaatttctagtccaataataaaatggattcatcgatcaagtattgacatttcgaaacgagaaaagagaataagaggaaatgcactacagatgaatttgaaatcgacacttgcatgctcaatcaggcactcaaatatgtgctcagagaaaaatacactacaaatgaattttaattcgacacttacatgctctatgctctatcaggcactcaagcactatggtaagagaaaatgcaccataaatgaattttaaattgacacttacatgctcgattgggcactcaggcaatttgctctccaaaacagaacacttgttggtaattactattcaaatatattttgaaatgtgctaaagctataataatatgtcatttctaggacaactatacatatactcctctgttttttttgccgacactttggtaagccattcgtgtttgagttgatttttaagttcgtttgattttggaaatacaaaagacatcttataacaaatctcttttgaaaaaactcgcatgctaacttgggacacttttggaaaaattttttaaaaaaactcgcatgctaacttgagataaaagtcggactcctaattacaactcatgattttcttaaaaaaatatatatccaagtgaattcccacaattattttcaccctagctaaactatataacaattataataagactaaaatagccttcacccgttgcaatgcatgggcatttttctagtccaataataaaaaggattcatcaatcaagtattgacttttcgaaacgagaaaagagaataataggaaatgcaccacaaatgaatttgaaatcgacgcttgcatgctaaatcaggcattcaaacatgtgctcggagaaaaatacactacaaatgaatttgaaatcgacacttacatggtctatcaggcactcaagcaatgtggtcagagaaaatacaccacaaatgaattttaaattgacacttacatgctcgattgggcactcatgcaatttgctctcctaaacagaacaccagttggtagttactattcaaatatattttgaaatgtgataaagctacaataatatgacatttctaagacaactgtacatatattcctctattttttttgccgatagtttggtaagccattcgtgtttgaatcgatttttaagttcgtttgattttggaaatacaaatatttgtttgagtacgtttttaagttcgttcgcttttggaaatacaaaagatgtcttataacaaatctcttctaaaaaaaactcccatgctaacttgggacgcttttgaaaattttaaaaacactcgcatgctaacttgggataaaagtcggactcgtaattacaactcatctaaacttcgtgatctatgatcctaatgacgacttaagggtcttggtcataatatatattcacggtgacaaacaagcttaacatgaacgctgggttgattgccatggtttatagaagaacgtttatttaattaagacggagtagctacattgtatcactctcgagtactttctttgttttaaaatataagtatttaaaatataagtattaaggttaaatagagaacaccccttattaatgaggtgtggttatggataggatagagagaagacaatggaacgatgtgtcgatgttgtgtacgaaagttgtggagccatgctggctcttttttttgccacgtcacacgcagttcatctgagcaatgtctctatataaacccgtcccctgcctgccttgcttgccacctatcccagcgcctcttccaggccactacttctctgggctctggctactcttcgacggcggccggcgtagcgagctgtagctgagctgaacgcagaaccgaacaccaagc

SEQ ID NO: 6549 - DNA, 2000 bp, Oryza sativa
aaagtgaattgttggtctctaaacttgttcacctgtgtaatttaggttctctaactctcgaaaatttatttttcaaattcctggacaagtgtttcattctgattccaaattgcctagacccctctataaaatgagggcctgtttagttggtgaaatgagaattttttgtgtcacatcggacgtttgaccggatatcggaaggggttttcgggcacgaatgaaaaaactaatttcataactcacctggaaaccgcgagacggatcttttgagcctaattaatccgtcattagtacatgtgggttactgtagcacttatggctaatcatagactaattagactcaaaagattcatctcgcgatttacatgtaaactgtgcagttagtttttcttttatctatatttaatgctccatatatatgtttaaagattcgatgtgatgtttttgggaaaagtttcgtgggaactaaacagcccctgagtcaatgccttcatgtggcatgtcaggtgaacaacacataggatcccggatgggtcatgaccgaaataacatactttaacaagtttaggatctaaaaatgtattttgagagttagaatacttatatgacacaggagaccggcagtgtactttactcttaattttgtataagtatttaaataagagtataagaggacaaaaatcatttttatttctggtgtatataatatttcgtcttatctcttactagctggtacaagtaaccagtactccctctggtaaaacaaaaatacatcatttgattttctttcaatcatactagaattttgatcatcaataaatttcaaaatacttaagtctaaatcataaaaaatgatatatgtagctttgtcttgataaaaatactacctccatcttaaaagaagtacacttttatccatgaatttaaactttattttggcaccaaagtagtacgctaataatccataaactaattaaactttttgtaactaatatgggtagaccagtacttagcacttctttatattttgtccgaaaattgctagattgacaagtaatacgaaacggatggaggggttgtgattaaagtatcatcattgtgacctaaaaatgtatgcgtatattttggttacagatcaacgatgcttttatttatttgaccatttatggtcagaatagactttcataaatttatcttaataaataatcacggtccaattcacaccagaacgacctaaaaatatcttcatattatttgatcagaggagcatgtgttttacagatcaacagttcctttgtttatttgactattcatggtcagatttttctttttggttttaagaagactgtgcaccgtctctctctctctctctctctctctctctctctctcacgagtactgagtactgacaggttagtttgtytccctattcattggacaattacgcagttacacaccagtgcccattttttgaccaactagtgaaaacggaaccaaatcaaaagtgtccatttaccgaatcaagtaacgacagcacacggcgatttgtctgcgcgacgaaggctcgcggcctcgcgcctggcagctcgctcgctcgctcgctcagtcgaccgtcgctgcttgacttttcccccttttcaaagtcgcttcctctagacccagcgagagcgggcaatgacggagcggccactgcttccgtccgtccctctctccttccgtccctttcggcgtttgttgtgctccgtctccgccgcgtcactattttttgcggtataaaacccggcgctgccccctgcctccaaccacaccaaaacaactcgcatccgtttcgttcaagtccccccccgaaaagagcttagtagaagcgcgccacagagccttctcgacctggctctcctctagccacctctgcttcttcttcttcttcttcttcttcttcgtctgatcgccaccgaggctaaagccaccaggaggagcaggttgatagctcggcaggcaag

SEQ ID NO: 6550 - DNA, 952 bp, Oryza sativa
  misc_feature (1)...(952): n = A,T,C or G
natttgrggsctwttttyaagatgggnctttwmactttnattngraaanttttaaattttmaccycmaatttkgaaaatttttaccccsrwtttkgaawtttttnccccntwttttnamwttttwcccccntttttgaaawtttkgggkaaarntttaaaantttttaacytaaawtttaaaawtttaaattttmmatttttaaargggkkttttaaaaaaaaatnggaaaaaamcsgggaaaaaaaagrraacyttaaaawgggggaaaaaaaatgssaaacgggaaaattwaaaggggsgggcccccgggggggggggttaagctaaattgctggcacgaacgcgcgcagtagcacccccctccgaggagatagaggtgctctccgcgctagatcggcaggctggtgtccgattcccccatcagcgtttgcctcctcctagtctcaaccgttgagcttgtgctgctgctttgttgactaggatgtcacaacagccaaaccatccatatactgccataaaacatgatttgaaaagttttgttaaaatgaagggtaaagattttcgatattgtggtttaaggattacaagtaaagactcgacgtacagacaaggaacaatagatggacttatcccaaccgatcaccccctaccaggccggcccattcgtgcgcaggccacgctatcccatgcgattcgagaaggttccacacacacacacggccacccgcatccgcaccacccgcaagccgcgacgacgtggcgccccaccgcccagccatacatccatcccagcaggcagcagcccaacaaccaatccccaccctcctccgcaagccacgcctctccccaaagtcccccaatccccaataagttcacgcctccacacgccaaaaccaaaaccctaaacccctcctcgcctccctccccttccttcccctycccgtccggcc

SEQ ID NO: 6551 - DNA, 2000 bp, Oryza sativa
gacatgatagccataagttaaacaatacatagagatgcagtttttttatttttatttttatttttttgatatatttttcacacttgggagaatacaggaaccaaccatagaaaaaataaactcaaatagacaaaatatgtgacttgtagaattttccaaagctctatcgaaaagtcattcgggtgtcatttattaaaataggcgtaactttctcatacggactcagaatcaggcaaataatatatcacggacatctacagaaaaagttacatccaattctccctagcttcgcaggttcagcgatattaaaacctccaaattccgcttgcaagattgtgttttcgaggagagaagtttttcggtagagatttggaaaattccacaggccacatatttcgtccgtttgagtttattttttatatggttggttcttgtgagttcctaagtgtgaaaaaaatgtcaaaaaaataaaataaaaataaaaaatttgcacatctctctcctctgcactagttcggagagagaggagaggagaggaaaaattatacaggtcacatattatgtccatttgagttcattttttctatggttgattcttatgtgtccctaagagtgaaaaaaatatcaaaaaataaaagaaaaataaaaaatttcagggggggtgccagccaatctggcgcgctccccctagccacctcagcatcgccccgccacgtcggcagggggacggcgccagccactctggagccaaaaaggaccatttctgggataagtttttttaggggtctatttgcaaaataagtttttcaaaaggaccaaaatgtgaaaaatccagatttgtagcacaccacggcaaaccaaaaaaatatatttacccctttacttacaccatagccccagataccagacctctccatttgctaggtgcaccgcgctgctcctgctctattgcatgctgatccggccacgtccatgcttggcgacggcggcggcggtcgggtgcatcggatgagaaggtgaaggcggttacatcaccgccgacaagggtggtcagctcggaggcagtggatcgggcaggctgggttgcatgcgacgagcttctccggtggccgcggtkgggggggggtgaagctccgtccctcttcacatctcgttggcattcggcccatactaatgtaagtcccacaaggtaatgtaagtccatcttgtgcatagaaaaattattgacaaaaacacatttcaccaacttgtccttatatgttaggaaaattctacctagttgatgcgggatatggagcaaaacctggatttttacccccttttcatggtgtgaggtatcacttgaatgagtgggggactaatcctgtacagaatgagaaggagctattcaatttgaggcactcatctcttcgggtgaccgttgagcgtgcatttgggtctctcaagaggtggaaaattttagatgatgctactccattttttccctatccatctcaagtggatattgtggtagcttgttgtattattcagaattggattatagaagatggtggtgatgattttattatatcagaggaagaatggatagccaactacaattatgcaacatcaagaagtgggcaagctagtgagcatgcatacatggttcagttcaggcaggataccgcagaccaaatgtgggaagatcgtcaagctcactatggaaattgaaaattttaggtttgtagtctatgtatttgtatggaactctaagacttatgtactcctttttaagacttatgtatttgctgacatatatttgcttgctgaaatttaaggtttgctgtaatttgtatgcttgctgatatttatagtggtttctgatatttatatgcaaactgacattaatatgtgtgctgaaatttgtattggttgctgaaatttgtagcggtagctgaaatttagatgcaagcttaaatttatatgtttgctgaaatcaatttctttatacatgctaggca

SEQ ID NO: 6552 - DNA, 2000 bp, Oryza sativa
tatacatataagttggatttagccgatgacaacaaaggtttcactgtttaatctaatcttgtggatttcatgatatcggacctccagccgatgtgtgctttaaccctcggatcgatgcttatttatccatatcattgctagccgattggtttatacaggactatattgttattttattatatcatcatcagccgattgcctttatatcattatctacattggatatatagccgattgcttaaaaccctatggctatcggctggtatcggcatcggctgttatcggctatcggctggaactactccatcggcttgtcagccgatcggctgttttgatctgctatttgcatatcttgtcagttgcaggatcaaactgactggcacgcccgcatctcatcaatctttggacttgcacaggagctaagcagatcttccaggccgatgtgttcgatttttttcgtcaacaagtataagtcatacttaaattttttttagtggcaaaacatatcataaaaaataaataattgaataaaacaaatgtcctaatcggcggcgtggttgtggccacggtcacaagtggtccatagcccttactaccacggtggatattggcatgaggatgcccatcatgcagtcctcgagcccatctattgtggcacgtctcgctcgcctcctcttgctcacatcgctaccactatcaacgtatgtatgttggcttttacgagctcgcaaccactgtgaacgtgccttggcggcccacgcaagaatgaagagggtggcgaggatatagagcaacacaacgcctgtcacgtgatttctcgatatcatatgccttggagagtgatcaataccggtaaagctggagctcaggactagcaataggcttgcgggaaaggctagggatccatttcctctggtcacccatgcgcctatcttctctgttttctcccataccatcacagcccacctccatcaccgcctaactcaaagagataggagagatgaaagggaggggcaaaaggacatttcacatggtttcactgataaataaaaataaataaatataaacaatgataagggtggcacatcctaagagtaaaaatagttcactgtctcgttattagatgcccctagtatcacaacaccctcctaaatcataatttggaaaaaaaaagagaaaactctaatccactatatgaaaatgaataatgcttgaatgaaccactggaaatttaataacaccggatctgaaaaaatggctaataaataaaaccagaggtgacaaaaacaaaacaaaacagtagagagagaaaaaaacacacacacacacacacaatagttgcacagtgcagagacaagattggaaaaatagaaacgagttaaccacctccagcccaaacacagcaccaccccccctccaccaccccgctgtctcccctcctcctcctcttcctcccgcagaagccggcgtcctcccccctcccgcgaccgccgccgccgctccggcgaggtaaagaccgccatctctacctctctctctctctcgcctccctgcgctctcttgtgtgggccaagtcggcggcgcctgtcactggcatttcttggaaaccgtttcttggcctagatccgaccgcgtttacggttcttggattttgttttgcccttttcgtctccaagaacgtagtcgcggtcctcctcgtccgtgttgtcgaggcggggtagaggggagatcagatccgtgctcacttggggggttgatttgttttagttggtgatcgacactgacctgcttggattgtttcgagagtttggttaccgcatttttgtgttcttctgtgcagtttagcctaaatctgttcagttttactgcgaattgttttctgccggtgtagtagtactaagttggttgttgccataaggatgcccccgctttaggtgcatccctgcatcagggattcagtgagtttctgatgaattgaggacgaggtgaagattgatgag

SEQ ID NO: 6553 - DNA, 2000 bp, Oryza sativa
caatcctataggaaaatttcctatgaagccctttgaaacaaaggattgaatcctatctaatcctttgaaattcttatggaatggacaatcctatagagattttggaggaaatttagcaagagcttcaacctcttgctaactttcctttgagtctatatctctcatcaaattcctgtgtttttcctgtggttcaatcaaacggtcattcctgtgtttttcctgcgttttgcaatcatctgttttacacttacattcctatcaaaatcttacgtttttcctattcctacgttttctcaatcatgtgattcaaagggaccctaaagcgccgcaactggccgatctgtacacgtagcctcccagccgtcactcctttgacaagctagctagtagcacacggatgcctagcaactgtatacattttgcgtccgtgtcaccgtgaagtcatcgggatgacgtcatccttcctgacgacagcgtgccagcatattgaagccctcagcgccgacgtagcatctcgctgtctctcactaaaatactgtgcacataatatcgtgaagtagcagcttctatcgatgaggccggcgagagcaaccggcaactagcatcgaccgaactactcgctagatttgtccaggggctcgatgacgggataaaaacggttagaaatggtatgattagtagcatgtgttcgaaaaccattttcagttaatcaaactttaattatatttttaaacagtactaaaaggtgtgaataaattaaataaattttatatgttactagataaaaatgttatcatttataaaaatgatatttgatcggtcgggaatcttcgtgaccgccattttcgtaatcggagactcccgggctgtagttgatgcccgtcgcatcgcaattatcgagtgagagatcccgatcgatttcgacaggtaggccgggggaaacagatactcccctctggtgctgtagcaatcgcttgatcgcacagtggacgattgatagctagcatgtcggtgcgccggccatacccggcgtcaggcccgtgccgctctttgctgtgcccttttgcggccgtctcgcgtgggatgcgtgtcgccattttaatatatatcctcccttgcggtgccttggcagttttctcgattgaaaaatgtggccgtggcgaacgttgtcgcgatggagtaactaattttctttttgcgttctttaagactatattaagcttccctgcaaaaagaaaaggactctattaagccgtggctttgaaataatcgtgtgggaaattagcacaatgcgtggcagattgaatgcctgcgtgtcagactaatctccggtcagttgtaaattattagtagtaacgttcacggcacgccgccggccggcggcggccgtcctgtaccggtgtcgacggagggcgatcgacgcagactctctagaacgaagacatcagcggcggggtaagagctcacgttctgataaatggcagcctcagccgcaattcaacaagtcggcaccaaaccggctgacaaggaggaaacccgaaagcggcagaatgattcgaatactacccgtactaccgactgcgccgcacgcacgaaagtgcagagctggaggaaaacgatctgttcgatcgttcctcgtctggtttaccagatcaacaactacgacacctttgcgttgtacaactaacatgttatatgctcaattggttggtcgaggttgatctaacgcagccattagtcaaagactactcttgtatatcgcaccacaactaggtcaatcaatactcgattttttctgtcccatctgcgtctccaaaaaggattctctcctcatgggctagctaggtgtggtaaagcgaagttaattcgcctataaaaggccgcagggcagaccgaaatacatgtactaaaacctcattaattgatcaaggcagcgagtagccccagctaaccattacacgggcattccatctccagccatccctagggctgtaattaac

SEQ ID NO: 6554 - DNA, 2000 bp, Oryza sativa
ctaattatagctttatacggtaatggatggtcacgtacttacgatgctaattaacggcaaaaacattaaatacgtgcgtacgtacatctagctagctaattagtaattaattaagttgtcgcaccttctttcaagttgatagatttcatagtatatccctggctaattaatatgtgtatttgtccggcggtccgtgtttcacaatcgaccggtccacaactttgttagtatgcacctcatattaaacttagagttttagctcatggcccgctcaaatataatggtgtgaccggccggccatgcatgtatggcgagcacttcacatgttcaaacgatgcatacatgtatagatcaattcattttctccagaaatacgcagtgcagtcgatagataattatcatgccaagtcgattgacacttttgacagttatcatgagctcatacccctcggtgggccataatggtcgctacgcgtacacgtaggtgctgcttttttgctggtatgtataataagaggaatttttacggttattgagaaaatacttagataccaaaactttacactaaaagcttttagtaccttgaggtacttactacctagaggtacgtaccaaattttacaaacagagatttgctacagtccaacaaaaaataactcaaggtactcacggtatcaaatcgttttcgatcgttagatataacgatattcatcctgtctagctaaatctaacgatctaaaatgatttgataccatgagataacgatgcctcgagctatttttattagactgaagtaaatctcatagaaaatatggtacctctgcataccttcttaaggatagtaaattacccatataataaagatgggattaagtgcccgtacgtagcgtatatggtccagaacacaattaagtgcggcgtgcattatatgtgtactggtcgaatggaatatgcatgcacataaaggagtacttgtgtcgctcaattaatttgcagaagggagtggctcagacaagctccacccttacaggggaatcattatttcatttttgttgaatactagctaatatggtcctcaattttcacttcgagatcattttagtcccagatattctatatttaaaaaaatatcctaaaactttgtcacgtagctttgtatagtccttgagcccattaaaaaggccacgtagaaatgtctcgtcattctctcgtgcaatgccgggtttttgttgttgcaaatttcacaatatgtaacttaaaaggtgagatccacgtccattgcattggcacatgaatgaataggaccgaggaggaataagatgacagagaacaatatttttcttccattccttttggcctatttatatacatagacaactcaacgtatgaactatattatatagcctaccctcataatgtgagattttcgttttccattggctgcccttaaatatccattctaccttcatgtacagtagaataaaaaggagggaatttatggatggaagttagctaaataaggggttgtatatatattttaaaacaaaatttaaacgttagaaatataatttacaatggagtgagtatttgttaagaaaagaaggaaatttccggaaacaacgatgtcccaaaacctcgtctagctacctaatccaaaaacttctacgttttactttggaaacagtatccctcaacctccgtttagtgtcactccttctgtcccattttaagtgtagacgtgggtttctatatccaacgtttgatcgtccgttttatttgaaattttttatgattaatatttttattgttattagacgataaaaatatgaatagtgtgctttatgtgagatttatttttttatttttcttatatttttaaaataagatgaacgatcaaatattaaacacgaaaacccataacaacacttaaaatagaacggatggagtagttagcaaatcttccacatgccgttatagtcgcacggtccgcggtcgcagcc

SEQ ID NO: 6555 - DNA, 212 bp, Oryza sativa
atttttttaataaaataaacggttaaatatattttttaaaaaatgaacagcctcgtatatccgaagaagcagcaacgaacgaaatcgccgacacgtggatctgcacgctgaagctagccccctccagaaaccggcacgtctgcagccacgaacagagcatcaacacgcacacctcagcgaagagcagagcagcgtctccacgatctccggcg

SEQ ID NO: 6556 - DNA, 2000 bp, Oryza sativa
aggcgcgtagggcagggagagtgcggccgtgacctatgggctgcttatcttccatcggtgactttagattttatggactctactttagggcacacaccagtgtaaaacttgtgttcaatttcgatcttaggcttacctggcatgtgaggttcggcaaatgagattctcgcactgctatcgccctaaggataagtaaaccaggagacggttaccgaagtatcaaatatatcaaataactctcttttggcaaggtcgcatatagatttattttcagaaaataggacttacattttgaaatctacaactagcacccggtaggtaataatgaaggtttagtttgtaaagtatactccctccgtccccgtaaaaactaacatacagtagaatatgatattttctattactataataaatctggatatatctatgttcagattcatcgtaaacgttacttctcgttataaattgatttttttttatgggagcgaggaggagataaaaaaaggtactacctccatcccaaaatataataatttttgggtagatgaaacatatcatagcttgttcagtactatatatcccatccaatcaaaattgttatgttttgagagagagtgaggccatgtttagattccaaattttttcttcaaacttttaacttttccgtcacatcgaatttttctacmcaaaaactttcaawttttccgtcacatcattccaatctcttcaattttcaattttagcatggaactaaacacagcagtagtaggagttttaaaaccggaaaagaaaaaaaaatccgaggcgtctttctccgtttctcgaagccgcctcctcctccggcgccgctagcttctgggaaattgcgtggtggagacgagcacgctacggaccccccttcgacccaacggaacgaaccgtcaagccgcgggattccttccccaaccttccaaggctccagctataaataccgccccctccttcctcctctcctccccacgcacaccccgctgcttccgatcaaatcgatccccaaattccccgatccccgcagccgctcctgcgactcgtaggtctcgtcaagtcggcggcgacgactttgatctctattcaaggtatgtatatacggtgccgccgcctcctcctgttctggttttgatctgtatataggcgattgattggtttggtggttgggaaggtgaaatcgatctcgggctagatctgatcgattgtgtagctggatggttgatcggatcgtttgttttggtcctggatgctcgatcggatagttccgtggtaatttttgtgtagatctgtttgttaaatcatgatttatttggcttgcccggttgtcccgtgcaaatcgtgcgctaattttacctgtgagtataagttgtggctctgtgtgtatttgttcctgatgctcgtgtggtcttgataaaagcttgggcatatctgctgatccatgatgtactcttaatttttgccctagcaaacttgatgctgttcgtgtattcattgaattcctgatgctcgtgtcctgtggcctccgtaacctttcacttgtctgctgatccattatgtactgacttaagccctacagccctagcatacttgatacttttataggtgcgcattgtttgagttcacaagattcaatttagtcaagttgcagtaacatgattggaattagaattcttcatgatcctgtgaagcacccaatctagctttgtcagatttgcatgtggcacttccctgagttagatcaaagatatgctctgctgtatatcttttttatgctttgtaatctaatatagagaagtacagaacaaccattgctacgtttgacattaactacaaccttctgttatctgttaattttttgtagtttggtgcttagaagaatctttttttttgttaacatttgtttgcttgatcctggttcccttataatcttgtatatactggagacttaccatggttgatatacattcttgcag

SEQ ID NO: 6557 - DNA, 2000 bp, Oryza sativa
catctttattttggtgcacattatcacgagcatagcagtttggcaatattttgttctatattaatatagaacaaataaaggcacgttagaggtgacctatgacgggcctttactttcgggcccgtcacaggtaaatcacctgtggcaacttctatatacggagaccatcacctctgacggcctttatttaaagggccgtcagagatgagtcacttgtgagagtcctaactggccctaggctagcggagaccaacacctctgatggtcttctagtaacttgtccgtcagaggtgggtgtcacttgtgatggtcggccatccgtcaaaggtgactggactcaccagtgaccactgatcactgaccatgctcaaagccgttaaaggtgagggtttgggaccgtcacaggtgaccttggccagtgtagtgattggttgcaaagagtctgaaaacttgggaacttatctcccatcgtaaaacgagatgacttattagcgtattattaattaagtgttagttataaaattttaaaattaatttatatgattttttaaactactttttcaatgatatttttaaaaatgaattacttatttccattttgcgctcgtgtttgcttagtatacctatcctattcactaaatagatttattcctcaggacagttaaggaggtgtggattcactttgtggatagatatgatgggcctgttcagattgtagccaaaataaacttttgacaagatgtcaatattaccaaaattttggcagaatttattatgtatttagcaaatttggcaacaaactaaacgtagttattttttttgggcaactttgccaaaagatggtatggttgaaaatggcatcaaagtgagcaggcccgatcaatccaacatatgatggcagaaaagtaacctgaagctgaaacgcaaacagagtatatgaaggagcgcgaagttgcagtacgtgcatgaacgacatataagaggtccgtaaacaagctcaagcccgattcttcggaaacaacaatttcttcgccatctgccagtgctcttcctctaactagcattcagtcttgtagcaacgtcaaccggtgctgtcttacaagggcaaagaaattgcggcaaagagatgaaaccaacaattccaatwaaaatwataaataataccccattaattcaaacattttaattaaaaaaacaactacaaagaatagatcaccctaggggtgggcaaggaatataaatcacgctcccctaagacaatttatataacatggtaggctggggagatgccggtcgtgcatattttacaggcggcttcctcctggcgataaaattgccggccgcataccaaaagaccgcggcgcgcccctctccttgcctgcaacgtcacattccccacactcccctatggcgatttatatgcatcgtccaaggtgagggtgggagaagtatagttttgtaaaattttgaaacaggaatttttaaaaaataaatataaaaataaaaaaatacagtatgcatatccgtccaccatcctccatcgtcctcctaagagcatctgtagtgtataaggtcgacgcgtgaaacgcatgatcgaacgaaatttcgattcgatctttgcagtgtagtaatcgatatgtgggacccagtgggacccgcatctaaagaaaatctcaacctcattctggtccgcctctctcacgtaactcagtgaaaacttttttttattcggttatgttcgactcctttgtagtagtcgattttttcactgacacatatggttcgagtctcacagtgtactctgttcgattcttctgtccaaggttcgattttgtctttacattggagctgctctaaggccgacctaaagcccaatatcagatgcgactccaaaccttactaggccggcctaaagcccacagctcgcaaggcccaaaatcacagataaagcaaaggctctcgcaaacttgacctgtccccctacatccccccaagcccaa

SEQ ID NO: 6558 - DNA, 2000 bp, Oryza sativa
ctcctaaattttctaaaagcaacttaaactttagttatgatgaattattggcttggggatattgacttcaaatctaatattgaacgggttccacttaccttttataagaacaatgcgatgcgtgacggtgtgaggctttgtaagatattctatttgttactgacgttgtgtactacgcagtcgtccagaagtcagatgctcaagtcatacgtatagcatttcgcctttatatggataagtatatccaacctagtcagacatagatagggtaacaagcagagtaaaattcatctggatacggtttagaattgagatcctcggcagcgcgcccgtgcggaagtgcatcttgcgcggaaaccatcgtgtctctcggatttgtacgacaccggtgcgtgtcgaatttgtactacggctcagcgggtttccctgagtttcaccgccccaaaaccgcgagcatccgccgttgcacgagccgttggccgttgcgtctccgccgcgtgcgcatgggcgtggctcatctggggaagcggatcctctgactttgggttgcaaagtcacaggcgtgcagttctgctctatccaccgttcgttatcatccgacgatccaaaatcgtccccccagttcctttcttcttcctctgtttccttgctcctatttctgcgtagcttcacggttggccgccatggctgtcactcttggccaacaaagcacacaatttctgccgctcaaaaggtgtagacatgttgttgaaaattttcttttaaggctacagcttctgtcttagtcagattgttgttgcaacaagaaaaatggcattcgattattgttgaagcttctccctttgcatgatcttacccaaagtctaagaccactgaatttgaacatcactttctccagtgaaggactatcatcagtacttaacgagctgacatttcaacgacgcacctggtatcgtgtccccatatcatcaccaagctctattcgcgcaatgatgcggggatgcgtggggtacgaggctaaaagattgccctatagcaagccccttttcgttttctgcatcggccatgatgcgattgaagtttgttgaaagccgacaatggcaaccggccatgaagctatgcaacgaagggagcaaggaacggaggaagaagaaagaaattaggagaatgagtttaaaccgtctgatgataatggacggtggatagaatggaacttcacgctcatgactttgatatgcaaagtcagaggatccgcgtccgctcatctgtcatctcgttcttctcacgtcaggaatctccagagggacccacccggccatccacgtgactagttgtacattttcttaattcccttatcctttgtctgccgtacgccgctgattttttgttacccctaaaaagtctcctttccaagttctatttggactgagactgttacgtgggccccatcgacatggttggcttggaagtacacttccgatcgtataatgaacgtcaacgtgtgcaataaaagatatcttgttgattttgttttggagtgttttcttgttaattggatcacgccgcaccgcacttgtccgtgttggcctcccaaaaatccgttataaattatcytttatctttagaaaaatcactcacctcaaaagataatttataaccaaaagaccaaaaaccaatcgcacaattgtcaagccaaccaccccagatctacttacgacaaacacccaatccaggccgtccattcccaaacaagagcggatctgagccgtacaaatcctgagtgcggatccgcttatggcgcaaaggcgaagggtactcgaggctaccggttaaaacgcccaagtcagtggctctcgtcctcctttctcctacgcggccggagagaggaggggggaagagaggatctcgcagagcgccatagcctcggatccagaagcggaattcggtggaggtctcgggcacctggatcgatcggaggaagggaaggcggagcagcggtg

SEQ ID NO: 6559 - DNA, 2000 bp, Oryza sativa
gaggacagccaaccattttgtaggtagcctccttgccgccctctcaaagggttgtaagggggcacctgcagtagctaagtgagtataacttcactggttaaatttcttgtggtggaacagcccacctgagttcaaatcctaaatttgacacggatgttcgcgtttatggctaattttcttttagtggtaaacgatgtactccctcagtcctaaaatataacaatttttagtcctcagagtttgtccccaaaatataacaacttctctactaacattctcttcccaaccaatcacaaccctccatttactttttccacctgcctacactactcatccaatcacaaccctccaccattcacctctacttactttcttaataaccgtgtccaactttaaaacttcttatattctgggacggaggaagtacctgtcaacagcgaggtgctcatgagggtagggtgagtgtgttcccgtactgacttcgtcactctcaatcttttggaggtgctcatgagggtagggtgagtgtacgcatgttgtgagcatgcatttgtattgtattttttaaaaaataatttgtttaaaattatttttaaaatgttttaataaataaagtgaaagcttaaaaattttccttaatcgtgtgagccagttggacccaaaaaggattatacaacttagttagggcgtatttaagttgggcctgaagcatatgttcggcccttcttaattgatccggacaagagtgcaggagctgccgtgcccgtgcggtccattgtttcgtgggctgggcatgcattattgcggcatcggatacaccgccaatgtacacagggtcgtataaatggctccctgcatgacaatccaatcgtttccatcacggatcaggcttctctacttcaaagagtgtctttgtcatttacacgtgggtctaatgaaccgcgaacctatctgttagtgacaaaatcacggtgcgatctcaatccttctatcactccggtatatcctatacacataaataaaccagtgcacatatcatatacatcaactaacaaatattactaaaagttttaaaaaatatatatgtacttttaataatattgaatcaatgtgtaaagtattatcatcaaattcgtcacacatcaaaagaaaaaaaagacaaaattatagtcttaaaattatcagattttacccttttttattatcgctaaaatatagtgaatttgatgttaagattttacacgtaagtgtaatgatattaaagttatatgattttttttcwatatttttcgatgatatttgttactagttgatgtgtacacgaaacttctgtgcataagatatgttttttctttattatcactcctcaatggttgaacaataaactattctaacatggaaaataacatgaaataatacttatagccatataaatatacaaaattacatgtaaaaaaaaattcagacttagataaaaataaaataaatccacatatagcaataaaattacagttcaaatgatctaaaagtccaaattatatagcattgcaaatttagacttagccacatgcatttacatatgactgaatctacaattttttcgacgcctgaaatctagaaaatttcattaccgcaaactagtcctaattgatagaaaatgtttaatttgaccctagaatttgtgaaattattatgtataaatgattccactctacgatttttttcccaatttatatagctttgaactcttggttattagaactcagcccttataatctagtatctgatagattagatggttttttttttaaaaaaaaatcataacagcttaataatcattaagttcgctgctctcttttttcgccttttcgtctcctattattaccgttcttccttttagtcactttccaaattgtaagaacccttccttaatacctaaaaatcttattttagtatgagattcttgattccgagaagaacgcatcatccgcctaataacc

SEQ ID NO: 6560 - DNA, 2000 bp, Oryza sativa
agaaattctttttccaaaatattaaggaattattgatataatttattgtggttttgtatgccctagctgtagcgaacgatttatctatcatcttaaaagaaccgagaaattttttagagcccggacaaaactctattacgatctcggctgttggtattatcaaacgataatggcaagcccaagtagttgtgcacaggtttgttggtcttagttgccctcctatattatgtcaaaatgttttaaaaagtgataattcaatctccacacttaggacggctagataatctccacacttgacatgtttcctagtataaatgattttagttcaaacaaagatagtatttacaaagccatcatgatgctaattagtcataggaaaaaactagcgcaattgacaaaaaagcgttcaattttgactgctgtaacctagttcaactcatcaatctctcactttctgtccggattaaataaagggcaaaatatatgtcaacttatattaattgtattagatggctcattttaactatgtcattgttttttcaatcagtcatagaaaacactagattggttttttttcagacgattgcctctggttactatgtatgtacgatacgaactactgtttcatactgaattctctgaagtaaataggcgtgcatgtcaccatgctgtcttcctgccttttatagtgaaacccctggccatgggatatgtgagtccagccatcaagaggagcaggttgtttgaatagcccaaagagcaaatggccaaatgctccctctgtgattcactgattctctgcctttgctttttagaactgtcgaaacagtcaggcaacctgtcaagaaaaaggcacaagaaacagtactccgtgtagggacatggtagattggcgacacggacaggacaagtgaaaatgtgaaatcaacaaaggaaaaactacctctgtcctagcaatttatcttaattaataccaaagaaaaaaatttactactgcctccaatttttaatatataacactattgatttttttatcaacatttaaccattcgttttattcaatttttttcacaaatgtaaaaatatttaaatcatgcttaaataatatttgatattaaatcaaatgataataaaataaataataattacataattttgaaataagaaaaatggtcaaacataacttaaaaaagtcagcagtgttatatattaaaatacggatggagtagctaataataaaatagtagggttactatatgaagaagtaaggagtattaaagtataaaacctttttaaatactattttgatttgtgggctgatggtagataagaaactccaaatcaactttttctgagaaatttgaaatgctaaaaatcaactcttcttaaaacggacgaagtactacttccaaaaacatgcagtaatagcaacmaagaaacatactccctccttccgtccaaaaaaaaaaagacaaaccctggttccatacccaacgtttgaccgtccgtcttatttgaaaaaattatgaaaaaaattaaaaagacaagtcacgcataaaatattaatcatgttttatcatctaataacaatgaaaatacgaattataaaaaaatttcatataagacggacagttaaagttggacacggaaactcagagtttgtcttttttttttctagacggagggagtagtatatttaatcatttcgtgaagtttttcttcaaggcctcttctaccaagtacctaaccttccctaaacctacagctataagctttttggcaacagaaaaatatatagctctccgagaaaargaaaacaccactcgctcgctgacatatagtgagagagagagagagagagagagagagagagaggagaatgagcttttgttgtgtatagtagcaggaagtgaacaaaaaggggggatttttttttwattttctgtccatcaccttctttcctggaggagttctccaagaagcagagaagcattaccgca

SEQ ID NO: 6561 - DNA, 2000 bp, Oryza sativa
gctggactcggtggcattgtcgtctactcgacgacggtgatgtcacggccccactggtagagcgagggccacaggagccaagccagtgtcctcttcttcttcttcttctcctgttcagctggagcgccccatggacgctgctgctgctgctgtccgccacggcattgcgacggcgtccacgaggagataggcaggagtggccggccggccctgcttcgatctgctactaatcctgcttcgccgtgttttgtgctgcaggtacaaaatgcctctcccaactttcatggatttcttgatgcagatgcgccgtttaccttacaaatgtagtagaatcctatacgtttcgatctctcgctctctattctactctggttggagttggagagaaccggagagcggcattctttaggcgtgcaaatgcagcaaaatctcgtcttcttcttcttccctggagttcccggtacagaattagattggttatttttttcttggaatttattgatcgagattaatgccgactccgtatctggagttaatactcggggggttgggtgggtggctgataagtctttgcctgtcctgaaccgctctgcataatttttcctgctttatttcttcttacaaaacgcttgtgcgttagtggtggcaataataacacaaggacgcggtctagaagagtctcttcagtttttttgtctccactgtattcggattggagctcttgtgctgttacttcagttatcttgcttagtctaggtgaggagaagaatcaagagatgacatttttgtcttgtttagtctaggtgaggaaaaagattgcgttttttagtttcatatatgctagttttggattaagtaggaagatgcccgagcaactctttttgcttcctaatctgccatgagttgtgtgattgatctgttagcttagcattggttcattgtcgacgtagacctcgttggcccatccaatccttgccttgtcaagaagatacccacgcagattgcgttcctgtaggcctcccccaagaaacagacagaaatcccgggagaaggacctctcggagctcagattagagcactgatgaccacttgccccttacattaacttgtggtagcatcgctggattattaggagaaggtcacactcattcacaccacaaatactacacaatgggggtggggggaaggaaaagagcagaaaaattccaacttttgtttctcctggatcagggcacggtacagaattactgacgtagtagcaggcaattttcatggccctgctttgctccagtagctgccttaaagtcgggagacggagaccacatgcatctgtccgtggtttcacatggtttgctacttgctcctctgcacacttcaccggcttcacatttccatttccattacatccatggatttgtagatcagtggatgtgactcggtaaggagagtagttttagttcttggcccatcctccttttcttcgcttttgtttttgcttttgtactttgcgagtattattgccactgtatgtgtatagtactccatctgttttcttgcctcttcttggtggtcagtctcagcgagtgaatgagctaataagagtggtagctagttactgctcctactagtgatgggtctgcgactccgtccggaacacgtggctttccttccctcgcgtctcgccatcggttgctcctagtcccggccatggaggagggggctccaccatcttttcaccattgcatgtgtacgtctttttgcagttttgcttttgtctggtcggctggtcttagccctatcctcatcttctgttcggcctcttgagccgagctcctagctcgattctggctgcgtttttcccgggtttttaggtgcccttttttttttcycttctgktttggttccggtttttggagtgacagtttatgtaagattgtgtgtttcttggagtaggagagctgggtcttatgtactacacaggataggttcttggccgagca

SEQ ID NO: 6562 - DNA, 1170 bp, Oryza sativa
aaagttactttctttktgttataagttacttctataatatatgtaaattacttttaggctttactgaatttacttatatatgtctaagaagtaacttagtgaaatctaaaagtaatttagacatattataaaagtaatttatgatttttcatcaaaatataatcatgtgagatcttgttgtaaagatttaattattacgaacacaacggtgtaatcggatgagtaatttaaaagaaaattttatttgaagcatagatgatagaaatatttctcctacttactcaatggattaagtactagcacgtgggtatctctggttaagactaattggagagacctctcctattagatttaccgacccccaatactaactgggtcagggttgccaccatcatcactagatataaataagcttgcccgaacgggggagaaagtcaatgtgcacaaatctcagagcagatcgtacggtctaaaatctgcatgattggggtttcgattttctggcaatcccgttaattcattattagtcttgttctaacctttcgtgtgagccttcatgacgctggcgagccgacgacgaagactgttgggtcgatcgttttcgctggagtatacggcgctggcgagagcaatgagcaaattgtcgatctgcaattaatgtcatctcgatcaacgtactgtggttaagtcagcaagtgtagtctcgacaaggaaccaagcgcggagtacgtacstacscaattaattaaggatctgatttgatcgattttctctggataatctcagtcattgatcgawttaacagagtttccaacttaatttgtcaaattgtccccgcttgaattaagaagggaaaagattagacaccaattacgatcgatcagtacaagcacgtacgccatgtacacaacttatcgatcgatcgattgacacgaagcacacatatcttctgcttcgatcgattccgtgccgccaggagagagacgaaaccaaattgagtttacatgtacgtacattacgtggccgtacgtagcaggtttgaagcgttctcccgacgtaacagtgtacacaagcgtattctagctagctagctagctcgccgctagtacatcctgaatgcatatatattcccatcagcagcgtgcacagaacacaagctaattcccaaac

SEQ ID NO: 6563 - DNA, 2000 bp, Oryza sativa
gaagcgttcgcgccggcggtcgcctccggcttgatctgcggcgacggcatctggacattgccgcagtccatccttgccctcgccaaggtgaagccgccgatctgcatgaagtttctgtcgcgatcggtgaatgcgcaagtggatggtttcctgggtaactagatgtgatcagcctgaaatcatcgccaatgtgaacaaccactctgtatcatctgtgtcatcatcctgcaatctcggtttcaaaaaaaaaaaatcatcctgcaatcaggatatcgtatgttctgttagggattgtactataatctgtctctgaacacctgtatatgttagtggagtgtgacaatcatccttgaatccttgattccaaatttccagtgttgtaattgtatatatattcctgcaatcatcagtaagtggcgttctactgtctccaaatcaactttgactactaatttcttttgtggcatatggagtatttactatttactgaagttcacaatgtttaacgcagacagccccaaatgttaggggtgacagtgtactatacgccatccttcaaattatagaaaaaaaataatagtgtgacagaggattgaaataaactacctctaaagtatgaacattatggatagacatggccaatacaggagtaacacaacattctaaccgaagaagaataatagatggttccttaacttagcttgcttagcctggaaacctaacatttaaaccgtttaaggccatgcattcggttcaggtggagagggagcagcacaaagggaaagctttgcggaggagagctgctttggctcttataggcaagcatcccagttccatcgttcatgcagcacaaaaaggaaagcttgcagaggagtgttgttttggctctgccctatatgcaagcattttctaacacgccggattgttcttttcagtttattcattggattattaccgtgaattatttgatgtgtagttcggaaaaaaaatttaaaaagaaaatatttctatattgtttagaccccttattctatgctatttattaagtttattttttaaaaaatgatttacccttcaaaaaataaacaatctacgacaataatatggtgaacgatgcatttcaaagtgtacttattccatccttaaaaaaaccaacttctaaagatgaatatgggcaatcacttgtttaaattcattctaaaatttattttttataagacggaagatatacctaagaaagaatgaaagcagtaaatgcaattgacatccaaattccaacctgtgactattacaccgtccataacgaggaaagatatcccatgatgcttgactataaatgtttacagccaacaggaaattaaactgacgtcctcaatatctgtggcgctatatggtttatcttaacaaagccagcaggaaatacctaacatccaaacgtgctgtaataggaaacggatgataaaaaagaaatatatctcttaatctccgaatagttttttttttaaaaaaatatatatctcccaatagtttaaaagttgatggtttatcgcaacctggttcacaatttcgatatgggatcaaaacctctcacaagcagtttcattggattttacagaacccgtcgataaactgacaaaaaccaatgaaatctagataaatcttgttaaaaattttaaataatttttgaacttaaccgaaaaatcgagcggtttgtgctttagaccccgtccgaaaagtccggtttccacaggaactgtaaaccgtgatcgcaaccgggagccaaacgtgctgtaataggaatctgggccattcgattcaacaggagatagacagaaaatccaaacggcgcagcacctgacctggctagacgcagctggcagatcgtatctcgtcgacctccatccaaacggcctctccatataatcccgcacacaccaccacgtgtgtcctctcgtagcaaaaccctgagacgacgagggactagctagaagagatcgatc

SEQ ID NO: 6564 - DNA, 2000 bp, Oryza sativa
tggagtttgctgcgatatgtagatgaaaagaaggcagtaagagataactcaggcatggttttccactaagcccagcggtggattcaccgcctggccagcacgggcagctgcccaggctccgcgcatgcgccaccgattagaacaagtgattgttttgtgttaaaatccatcgattttctgacttcaacataattagaagcatctgtagtggcagctagccttgcagcacgttgcatgatgcaattaggccatatccactggttggtgacttgcctgcttcacaatggattgacatgatccactcaagtaatgagcatatatacgtccatttttataacaagatcaacttagtttttcaacaagtgaaaaattatatgcatatgaaactaaactatgcttttgttagaaaattattttatcttcaattggcagtaaaatgagcatataaacattatataagtgggtaccgattttatcgttttatttaaatttgttcaggcttcataaaattcctagctccaccactgactaagcctgagtgcacttgtattaatgatgtgtaatattagaggtagtacctatcttaaccattgtacatgtcgttctacttgtatgtatacagctcggcaacgccttcacgccagaacaaaaggaatctccaccaccaccaggatagcgaccgcacggatcatgatagcatcatttcaaagcgatcacttcgccatcagcaccactagtttagcttgcattcctattaagcttcaattagttctgctttcacacgctggctgcctgtccgttcatgtgccttcacacaaaatcccctagaaaaccagggaacaaagcttggtcttgccggctctgttacgtagattctgatcattcaatcgagttgtatatataccacgagtcaacgattgtgcgtgtccgtttctgcaaatacttccaatttccttccccccttgtttatgaagactgtatgattggatcagcattcagaaaaaccggcttgaacatgcatggtgcgatcacagtcgtaggaacgaggaattcagtgatggactgatagaagttcggtctgactttgctctgcacaaaacatagccattctttctgcagattcagatggcgcgcgcatagcatttcatcaaaaatcaaagtcggaacacgaaccctgcatgcggccgattcaaattcaggccggctatgcaagctgtgatgatacgaagtgtcgaaatgggttactccgctttcacataaccctactccctccgtcctcataaaggacgtcgttttaaacaacgacacggtcttcaaaacataactttcacttcttgtatctataaaaatatttattaaaaagtgatatatgtatacttttatgaaagtatttttaaagataaatctattcatataatttttacattttcaaattcaacaatttaagagttattcatgatttatatttccaaggtttgacttaaacattgtcttaaacgacttcctttacgagtatggagggagtacaaaattaggcaaagatgaggatgacaaagaactgatatcaaaataggaacaaagctcaagaggaggttaaaaaacaatagccacttggatactacgctacaacgtctgcaacatcacattgaatacgaagatcctactactagctaaaaaatgtgaccatcgaaaacatcattcatctaagcgctcgatcacaaaataaatacactcgatcaagacatacattgattaatcagccagccagccagccagccactgacaaccaatcaggattctgggcggtcaacaagtaaacgcacgcccattcgcttcttcaccatcagatattcagattcacaccggatggtgtgtagtactagtgtatttcacgataaatacaacggcggcccaccaccacctcgctccgtagtgtccgcacagcgaacgcctctcgcgcgcgtgcttactggtgactggtccaagcagcaacgcaagca

SEQ ID NO: 6565 - DNA, 2000 bp, Oryza sativa
  misc_feature (1)...(2000): n = A,T,C or G
gaatgaagtaatgttaggtggtaagtggtaaccaatatcttatatatctatacaagtgatctgacttagtgtagttatcctatatatctgtacaagtgatccacttagtgtagttattacccaatttcctgctttgctgttaatccacgtcatccaaataaccgatagccatcagatcaaatctcaacggtccagatctggcttatcacagtcaaatcccaaagacatggatcctgtttaggatagcccacacgggaaagcccaagaaaaagcccatcccgtcgtcctccctctcttccccgccgcactagcctgttctgtgtcttctcgcaaaagcacacagcgccacacgagctctccgcaccccggcgcttgagctcctcacgtgccggctaggggaatcgccctcccctcttctcctacccccgtcgcgcccctcctcccccaccgcttcgcttcctctcccttggctcggcaccacctcccatgcagctgaattgtctcctcgagttctctccagatgtggaaaccgtcgagtcaaacgcccatgcatcagtgtgtggcgccacttcctctcccattgttccccagtctgatggcctcctcatatgatgataatgtttgtctataaattggattgcttgtgttctcctaacttgcatcttccgtgaccatgcgccagcatcaccaatcccgtttggaacttcggatgcattggcgaccaagcaggtgtcattttcattcctctcactctccttccttactgtaccccttcttatttgtgtacatgtgctcctatttttctgaagtcagaattgcctatattgcaatttgggttgaaaatttatctgcgttttctgtgtaaattctgattctgatacgcaattttgttgcattgtggaacaagaatgacggtgaaaggcattgtcctgttatggatcacgagcaatcgatcaaataattcagtatttgatgttccatctttttttttamcggaaamcggcacaagagtgtgccttttcatkgaatatagaaggaggaggttccatctataatgtgtagcaattcgcaaatctaaccatcattttattatataatcagacaggtacagatttttgtaaaaattaccttatccatctttgatgggtaacacattttattttttgaattgaatcctttcttcactacccccaatmtgctatatatgtgcacactgcaagtactgcactgttgttttttcaagctaaacgtgaattgtttcnagtccagaaccnagaccnattggatggaaatatagtcaatacgtgttttttcaatgtttatagcaaccacagtggaacatcagtacctgttctcacaatatggattgacatctgttcatatatgcagcgaataattattgcttcacctatgcaattcctaccagattagcgagaacatttgtatttaatatctgattaaaaccaaccgtacnaatttttcyttttgcttttcttcctgcatatggttcatgtagcatgtgaacaacataaaggtcatttgaacttacacatgaacctgttagattgattggsyttatttttaaaccttttcttcaatcatacttcacataatgacccgcagcaacgcgcgggtatcatctagttttcattataattgagactgtaawtycgtctactttctcagtcctaaaaagaattcaatctaagtttgaacctggacacataaatttaggattgggttttgttgagggagtattaatcccgtccaccgtgtcgtgtgaaggctacgtcactcagccgtcagttactcgtcaaatcaccaatttcaccagccgtcggtccaacggccacgtcatcgttatcttgaccggcccgtcagtgtcatcgaattggggcccatcccctcatataatccaacggcctacgcgtgctccttgccgcctggagctggaagccttgtaagtggaacagagacagtcagctccagccactgctccc

SEQ ID NO: 6566 - DNA, 2000 bp, Oryza sativa
ttctactacactctttaatttgcctccttgttttcccaggtactatcatcttgttgcaatgcaatgctaatacaccacaaaacaaaaggagaggagaaaaaaaaagaaagggaaaaagctaaacatctacacttctattaagctgacaagtgtttgtggctttgtgcatgaatgcaaaggctgtgcactgcatcttgcagcatcacaattcacgcatgtactacctaacgtgctattcttttttttttctattacacgaaatacacatagccacgaactactatacatgtgtgtaagtctataagagcacaccctcttaaaaacaaataccgaatagttgagaccaacgataaatacctgatcacactaaacatatctacctaccgtggtactctttttaacttccttarssgkwrgcagtagcatgacgtattgtacattccatggtaagaagtaagagtaacactaactcaatcaagggggtgtttagatccaggcgtgtaaaattctggcgtgtcacatcgggtattatatagatgttgcatggggtattcgggcactaataaaaaaactaattatataatccatcgctaaaccgcgagacaaatttattaagcctatataatccgtcattagcaaatgtttactgtagcaccacattgtcaaatcatggagcaattaggcttaaaagatttgtctcgtaaatagtctcaatctatgcaattagttattttttaagcatatatttaatacttaatgcaggtgtttaaatattcgatgtgatagggggtaaaatttttgtgtgggaactacgtgggtccaaacaagcacaaccaacagtctcctgggttacatatgtacaagcctataactacaactacaacaaggctgtatgcaattgcatggatttgctagctgttttgaatggtggttaaactggcctattttgccaggtgtaactgcatttagaggtgatttaatttaatttgctcgctgtttgaatgttggcttaaattggccttttgttttgccaggtgtcactgtatttagaggctctaatgagtcatgattgtcagatacataggatttgtttctacttagctgtgtgtgatgatgcatgcatgcctatcttgattggaaaacgcacaaccgggttggatgcacgtacccatctttctatytactagctgttgtgcaggctggagtgataactgaaaactttgaaacttttgtgaattgctttgaggaagaaaaaaaaagaagaaaaaaaaaagtcactttgaggaagccacacgagcacggcaacaagctctttgaaaccatggaagctagcctttgtttgcagttttgtgcaacccgatggatggatgcactcaccttcatgcagattggaaaaagaattcatctttggtacaatgtactagtcctaccactcctacttaactagaaataaataaaagatgatgagaattgcctatagaagaaaaagaaaagtaaaaccaaaaaccgtgccatctccacaataaaacttaaagcttaatacataattgtacctaaacgcaaaatagacctatttgaaccgcccgccgccgaatcatccgactaccgtagacgctacgcatatattgtttctcgaacactccagacgcgcccccgtccaaactacaacacattttccatcactaaatacctcatcccccctcctaatcttttttccctttaggtacaccaaaagaaaaaagaatattgaaaactccaaaaacataaaggaaataaaaaggraaataaatcctaggggcatagatagagagagaaaaaaaaggagagagaaagtgagtgagtgagagagagagattgagatgccaaatcatttccatgcggatcttggaggcgcccaccccggctacataaggtgccgaggcagtgacaccaccaccccaccccccaccacactcaccaagaacaagagcagagcagaggaggaagaggaatcagccgcc

SEQ ID NO: 6567 - DNA, 1303 bp, Oryza sativa
  misc_feature (1)...(1303): n = A,T,C or G
gggcramttckakctcggtaccgakgccycctykaaacccgtaccyaagaggcatgaaaggcygagymctcwcccwgcrtgwccgtaaatmgctkssagtaatcgacggttatcasyggacccccccgagaaactgtgacccsyasacagtgscamksgasagattttaaannaacggggagatagggagakaggaggaaaaagaggaggggtgagaatgatacskggggccatttgggtcccmccattttcaattcattcttttggtataacagacatgtggggtcacaatttttattattttccatatcaaattgccacgtcagatgaagaccgagtcaatttagccatgtaggcgtcacgtcagctaaaaccgtcgtccaaaccgttatgggacttatattgcaccggttttagcaataaaggtaccgttgtatctggttttcggttgaaggacgaaaatcgggttcatcgataagttaagttaagggagcacaggtgaactattccttctgtggttgaagggcgttttacagcgaaatgtaccgtgcgtacgcaagcagctccatcctggactggactggattcttcttcccttccccagcgaatgaagatcacctttattcgccgttccagtcacggattcgcagtaatggaatggatcacattcggtactgtattcgggtggagccgacgtctgtgcaaccaaccggcaaccaccaacaccttcaccttccgaatcctgaactgacgtctgcaagactgcagccaaccacgagcaccttttcttttcaccttcagaatcctccagaaggttaatgttgttcgtagaaggcactactcattatcaccgccttttacgtaccggctctttcacctagctagctagccagacgagccatccagaactcgatctctccagctcttctctgtgcaccacacgaacagcacgtgtgtgttgtgcccaacatggtaaacaccacacactagtgctccagtccagtggtaacactagtgctctttcgtttggctttatgctcttctttgcgccacaagaattggtcgcaaatctatctttgcgcccaacagggtcgaacgcccacgcaccacaccaaccactgcaattttttctctcaagaaatcaccgctagcttataaaagccggcctcgcgcaccgcatgctaaagctaccaccaggcacgtacaacacacaccagctaagctccaattaaagactcctccttgtttgcgcacgctcactcgcgcagccgaccagtggccgtgagctcggatagctgagaag

SEQ ID NO: 6568 - DNA, 2000 bp, Oryza sativa
agggttacacaataaacatttttaaaagaaaaaccataaccagtggctataattaaccgtacaagcaatgtgttacccctatcaacacacagttgcgtcatcttgacacacgcactattcagaagaaaaaggaaaacctgaaacctgtttctgaaaatactggagcactgcagctgaatgttcatgagcaaaccacctttgtcggcttgtgaaggcaaaaaaaaaaaaaacmccatttgattttcaccgctttagaaaatcaccctgtgatgggtggtaccattaccaacacactctcatgtgcatcctgccccaccctcccattaccctacctttgcaaacgcatcgttagagcaagtttattagtatagccaactgtcgacttcaaattaactatagttaattttagagccaattcatataataagttacctataaacatatactatataattaatatattggctcgaaagctagcttatactagcctgctattgtacctgctcctaaaagtagttaattactgctaattacatggattagttgggtaaaagcggggttagcggggggcggaatataaaaatgccgcctgcctcggagcccctccaccggctttgaccagtgccgcgccctctcctctctgtcgcctcgccaccaccatagctaatcctcctcctccgtttattttacttttctcccctcttcgcctctcctcgctgctgttatatccgctttcctctcctcctcctcctatcccccctctcctcctgctcctcggcctcctcccctagatgccagccgcggcctgaccctcaccgctggggagcccccctcccattcttcgcttcccccgcggttgcgctcccggagcggcgttccagcggccacaggtgcggtctctttgcttcccctctgctgctgttgttgtgtgcggtttgcttggttataggtggattttttggggttatttcatgggtggttactgatgtttttttttccgttgctgcctggatctttctcatttggattatcatctgctgctttcccaaagcgcgctgctgttttttttggtttttttaaatattttkgtttgtgtttgcgctcttgcatttataaattttcgccgaatggcaggctaggactttggatataaggtcgggggtttgaaaaccctcgaatttcataatttcccccaccaccgtttcagaagttcgtttggattctgtgaatgctcacaatgctgtatattagtaagaggtgagataatgccgtgaaggttttgggaattctgctttcacggccatggaagctgcaaccgcgggttcatttatgatcgcggagcggtgaaaatttccagtaaatgttttgggggtggtgcagtgcttggttgttggggtcaatgacttagctgcaatagattgcttatttaagttggacttttgacccggaattgttaatttggtttggtttggtgagaattcgactactagattccgtctctggatatggaagtagttgcagacgcgcgcaatttctgtgaagttgcattggaaaccaaactaaatggagtggtgtgtttgaacgtccattgttgcgtctgcggaccaatgcatcacaccacctggctcctataagccttcgtcthagcttgtctcttgatagatcagtgaactgattgtgggaatgaggcagttttagtagtttagctgtctcttcttctccagtaatggtttggaagttcagaatacattgagaggtgttgtamttaaggagagatatagtttttttttttttttttttttttttgctgatgcaaggttcgacgccttttgcaccttctgttgtactgcatttagctttagcagatgcaatacatgacaactttttattgttgccgacgactaactgctatattgtgatggggcagctacttttgtgctatgtgctaactcaggatcctatttgaaattctgtagcagctttccctcattgtacacatg

SEQ ID NO: 6569 - DNA, 2000 bp, Oryza sativa
acttgcaaaaatagttaaggttgtctcaggtcatagactaactaagaaaaccttttttttttggatctctaacaaatccactgcgaaaataattattccctacgacattagcatgtaaaaactgaatttcacatgtggttatacgtaagaaaatcaccgttaaaaataagagcaccactaaataggagtgggtagagtaagactgaacagaaaagatattcgatcagtagttcagtctcaaacagcgaaagacctaaattaattcggtcggtcatgggtctcagttaaccgaattgtagttgaatgtttgttcatttgatatcatttaggggttcaaatattttttccaatctcagatctatttttgaatttgtttttcttatatttgcaaaagacttcacatggagatatgttctataaaaaattgtaatcttcgatagagctagtggagagtctttgttgaccggttgagatggtgggcgaacagccacacgcgtgcgtgcgccaggccaggccgtgggcgtggcgaggcagacggcggctgcttctctctctctctctctctctttttgtaacggacggtattaaacacggtgattgattaacattactcccgcgctcgcatatacaccgccataggaacgaacagaagtacggaaggttcttcagttctacccgactcttgcacttcggttcttcctcctgtacctccctctgttcttgcgctgcaagatcctttcccggttccgttcacctacacgcacaggtgtacgggacgagcggagcctccggaatcctatccgcttgagtgcctgcacaggtaggcgggcaataaggtttttggggagcgtctcaacacgactgctctggcttactctgcatcgtcttgatggaaaaaaagtttatttatcatctttgatggaaaaataagacacatactcctaatagcattacacatatttgtaaagtctcatattcaaattcaatatattttagccgtaacaaaaaaaaatgaaaaatctaacagtttttgggtaaaaatctgttagaattttgtcttttttgttgtggctaaaatataatgaatttgaagaaaatatttcacacgttggtgtaatactattggaagtatgtatctaattttttttctagaattttctgtggcatttgctagttggtgtgcacgggaagcttatgtgcataaaatatgttgccctcaacgagatatacaactttgtagttgaatgtttattcattatttgatatcttttaggggttcaaatatttttttccaatctaagatctatttttgaatttgttctttttatatgtatttgcaaaagtcttcagacgaaggtatgttctaaaaaaaatttgtaaccttcgaataagatctacaacttaatagttgaaaggtcgttcatttgagatcattaggggggggtttaaatatgcgttaaatttgttggtctatatttttacctctagaaagtccaaacttaagaaaaatagaaaaaaaacatattaaacatgattgaggtaaaccaaagttctatgagatttcttatagtatttcctataatatggcaatttcagtaatttttagtatggtcacttactaatatcaacttacatggagactacgtaagatatatataagtaaacaatcatactgaaaatggttgttttaagtaaatatgaaccagtcatattaaagagaatattgtaaggatcgtggagaaactttggttcaccttaatcggacttgaaatgaattttctataaatttttaaagtattgtttggttcaccttaatcatttttaccagtggatcttagacttttgaattgagggacttaatcattttcacccgcggatcttagactgggagtattgtttcattaccattttatttatttcttttttgaaaaaaaaaatctctacaggttgattccggataaaacaccaagcatgcaactacaggtaaaccgtcgttcgcc

SEQ ID NO: 6570 - DNA, 142 bp, Oryza sativa
tctagcccccacaccacccaccgcccgcgccgcgcggccgcctcgcctcccctcccttctcctcctctycgcccccgccgccaggccgtycacctccgccgtctcctcccccattcgcacccaaggcgctggcgcggaaggc

SEQ ID NO: 6571 - DNA, 2000 bp, Oryza sativa
agcaggccgtcgataccgcccagatccacgaacgcgccgtaatcggtcaggttcttgacgacacccttcaggatcgcgccttcctgcagcttgtccatcagctgctcgcgctcttccgagtgctcgctttcgacgacagcgcggcgcgagaccacgacgttgttacgcttgcggtccagcttgatgagcttgaactcgagttccttgccttccaggtaggccggatcgcgcaccgggcgcacatcgaccagggaacccggcaggaaggcgcggacatccttgatgtccacggtgaaaccacccttgaccttgccgctgatgcggccggtgatggtttcgttcttttccaacgcttcttccagctcgtcccacaccatcgcgcgcttggccttctcgcgcgacaggacggtttcgccgaagccgttctcgatcgagtcgagggcgaccttgacgatgtcgccttcggcgacgtcgatttcgccagcgtcgttacggaactgttcgatcggcacgatgccttcggacttcaggccagcgttgatcaccacgacgtcgccgcggacttcaacaacggtaccgctgacgatggcgcccggcttcagcttggccaggttggcctggctggcttcaaacagttcggcaaatgattcggtcattagatttactctgttggacacatgggtcggtggcgtccccttcaggggaatggcgaccgcccgcctgttggtcgaccccggaaacgcaggtcgtgtgtagtaggaaaaccgccacgcatcattgcgcgacggggctggtacagcactgctatgcgcgaccactgccgatgcggctggcagtgctcccgcgcgaacggatcaggcagccggaaccggaagcagatccatcactcgggcaacgacatcatcgatgccgatgcctgtggtgtcgatgaggacagcatcgtctgccggcttcaggggcgccacggtacgctgagcatcacgggcktcgcgggccatgatctcgcgcaggaggtcatcaaagttaacagaaacccccttgtctttcaactgcttatgccggcgctcggcgcgctcctcggcactggcggtcaggaagaccttgtagggggcgtccggaaagatcaccgtgcccatgtcgcggccgtcggcgaccaggcctggcagttccctgaatgcgcgctggcgctccttcagggcggcccggacctccgggatggcggcaatggccgaggccagcgccccggtggtctccaggcgcagctcgtcggtggcatcggtgccgttgaccatgacccgcatggcatcgccctgctcgacaaactgaacgtgggtgtcaaaggtgcagcggaccagcgcggaggcgtcggaggtgtcgatgtcggcccagcttgcggccacgcccaccgcccggtacagcgcgcccgaatccaggtaatgccagcccatcctgcgcgcgatgatgcggctgatggtacccttgccggccccggatgggccgtcgatggtcaggacgggagcgagtggattcatgggggtcccagagcgtgtgaagaggccattctagcccctgccagacgcccccagcgggatcttttgtgcaaccacttgaaaccatgaggaaaagcccggtagaatggcgggcttgaacgagcgtcaactgccgattgtctttcgcatatcgcggccacgctccacccgaacaactactgtttacgccgaggtatgccatgaaagtcctgtcctccctgaagtcggcgaaggcccgtcaccgtgactgcaaggtcgtgcgtcgtcgtggcaagatcttcgtcatctgcaagtcgaacccgcgtttcaaggcgcgtcagcgctaagcctcacagccttccggctgcggctggccctacgcggggccgacccgatgcaagaaaccgccttcgggcggttttttgtttatgcggctttttcctgccgtttttgctgtaatcgcctttcttgaccactggggagtagatcgag

SEQ ID NO: 6572 - DNA, 1770 bp, Oryza sativa
aagcagacacataagctaggggacaattttagtatttcaagccaaactttgggacaaatgcgagcacacctcttaaacacacccttaactaaactttaggtataagagcaattttcagttcacaaaccttgcagcccaacgcgtacgtaagctgaccacgcactgacagtctaaccaagcaggactgtcccacaaagtcaaagcgaaccgacttgacctaactggctacgacgaggtctctaccaaaatggaaacgtaccagacaacatccgggagacagcgaggcgaccggcgtcgtacgtagtacaaattagtcgtcgtactcgtaccctcaattgccccaaccccgcaccgtcgtctcttcgttttcccatcgcagcggtgttttgctcgtcgtttttcctctcgatcggcccttgaccagcttgcgctcaactttcgtggtttattagtccaaaagttatgtccacttctcggtgccgccatgtgggtggttggtctaccaaagttcgggaaactattttgatcactcgatgggatatccctcatttgcttaaaaattatttaaatagttacttcctccattccaaaatactcccaccgtattaataaagatagtcgtttaggacaatgtttaagtcaaaccttggaaatataaatcatgaataactcttaaattgttgagtttgaaaatttaaaaattatatgaatagatttgtcttgaaaaatactttcataaaagtatacatatatcacttttcaataaatatttttatagaaataagaagtcaaagttgtattttagagaccgtgtcgctgtccaaaacgacttcctttatgagtacggagggagtaaaaggctcaaccactcttaatctaaagaccaagaaataattattatcatctcatagtttggatcactcatgcaaccaatagaatttaatatattgagtatggaggattcgaaagaaaatgctagttaatggcatgtattcatgtattccttaattatattatgaaacatttaaaaaaaatagttgcgccttatataatggaatggagggagtataaaaaattgtggaaaaatttaataacacttatacaacatatctatataaccccacaaaatattaagttcaaactcaactcatatatcgagatataaaaatatcagcatatgaatagtattatacggatcacatctgaatttttcactaaagccgagtatttaaacttaatttttattacctatcgattttactatatacctttatatttatcaattttttataattttttttaactatttgtatcgaatttgaaaggaaaaaaacacaggaatatctcttcgagggattaaaattcactcccactaagtcgtggtttcctcccagctgccaggctagctcgctagttgcactgtgtcgccggcgcgtcgcagatcctatcattcccaattcccacgcggtcgctgagctcagtttcacagttttcacacatatgtacaattgacagccacaagctctaattttggttaattaatcaatttcctatttatttcatggcatgtaggagtaagtgtgtgttcagtgatggctatcggtgggtgggtggggtgtactactcccctataaagggaagctcgcgtcgccagaacttgggcactaccaccactcgcctcacactcactcgctcagcactacttgcaccccctagctgagatcagtagtaaacggtcagtcaattgttgcaaagcgatcagctactggc

SEQ ID NO: 6573 - DNA, 2000 bp, Oryza sativa
ttgtaaaagaataaaagtttagcttaattggatccaagggatgtactgacataccgttatagagactaaagtctgtgcatcttgtcgaaatgtatttaagagatatcgttactgatcgaataactccttaatttatatcatgtcggagcggattgatatcattgtaaaaaaatgtctccttttattattgtaaaacaataaaagcttagctttattggatcaaaaggatgtatcgacataccgttataaaatctaaagtttacacattttttacgaaatggatataagagataccgttactaatcgaataactcctcaatttatatcacggcggagcggattgatatcattttaaagatttccttttcttattgtaaaacaataaaagttttagcttaactagatccaagggatgtaccaacataccattatagactaaattttgtgcgtcttgttggactgcatttaagagatatcgttactgatcgaataactccccaacttatgtcatgtcggagcgaattgatatagtttttttttaaaaaaaaacctttccttttttattgtgaaacaataaaagtttagctttattggatccaaggaatgtaccgacatactgttatagtctaaaatccgcgcaatttgatggaacggatttaagagacacaattatcgatcgaataactcagtttatgtcatgtcggagtagattgatatcgttttaatgctttccttatttattgtaaaacwataaaagtttagtttatttggacccaagggatataccgacataccattatagactaaagtcggcacatcttgtcgaaatggatttaagagatatcgttactgatcgaataactcctcaatttatatcatgtcggagcggattgatattgttttaaaaaacctttccttttttattgtaaaacaataaaagtttaacattattggatccaagggatgtatcgacatatcgttatagagtttaaagtccacgcattttgacggaatagatttaagagacagttctcgatcgagtaactcctcaatttatatcatgtcagagtggatagatatggtttcaaagctttccttttcttattgtaaaccaataaaagtttacctttatatattttttccaactagctgctgcattttatcaataaatgtaaatttatttgtataatcagctgccagtacatactgggaagtggacaacgaacttaagcacccattccttcgttttaggcggagcaagaatttaaattatggctttagtgccacgctgtactgtagtaggacactaggacagaactactgacagaatcgctctagaaccaaaatgcatggtttggtggcctactgttaattctagctgtagctagccttgcataattcaaccttattgatcgtccatgttttccggtgaattaaacccacatgcaaacgtagtaggttttttatctctctcggttcacaaatttggacccctgaattccgatcctctgtaataagctgagtagtttgtgcaaattacgtgaaagcctgtcgtttccgtggcccacatgaactggcccccatgcttgctgactcagactccgatcacttcgcccggccaatgctccgctataaaaccctccctttttttggcaaggagttcccaccgtgagatcgagatcgcctcctctctccgtttccttttatttcccgattcgctcggcgtctcggcggcgaccttgcgcgagcgcgcgatgcggtgaaaaaaaaatcatcgcccgcgacagagtacatctgtcccttccgcataaggcaacgtcgctataaatactgccagcctcttcgttcgtttccatttttcctcgtccgctcgctctcgttcatgtacaaataggagggcgcatgcaccttgtttgccattagctctcgacgtagcctagagcgcaagcagcagcagcagctagattggttggttgccaatgatcccggccatctccccg

SEQ ID NO: 6574 - DNA, 2000 bp, Oryza sativa
gtgaaaagagtgtcccctcgtggaattcaatgatcatcgggtatgggttgcatgggcaaagcgaaaaggctcttgagttgttcttggagatggagagagatggacctaggccaaatgaaacgactttcatctgtgtcttgagctcatgtgctcatggtggtttggtgcttgaaggttggtggtgttttgacaggatggtcaggttctacagtattgagccaaagtctgagcattttggctgtatgatggaccttcttggtcgcgccggactgcttgaacaatcagagaatctcattgagaatttgcaaggtaaggtgtcagaagcattgtggggcatactaatgtcagcctctcaaactcagaacaacatcaaacttggagagtttgtcggaaagaaattgatcgagatgaggccaacagaagtcggtccatacatccttctatcaaacatttatgcggcagaaggaagatgggatgatgttgagaaagtaaggaaggtgatggaggagaagggggtggagaaggatgcagggttgagcctggtaggatcaagggaaggtggtcatttcattaatgaaagtggagcttcagctccaaggaatgatgtgatgctgtgcatgctgggtgagatgagtgtgcatatgaagcaaccatctgaagggtccaactgcaggaaaagaagcccctctgctccttgaaacttgaacatacagggcacattattttgctgtgtgactgtcaaaggagaacacaaagatgggatgtttatgcctcattatcatggtatcacctactatttcttggatgatttcagcgtcaactcaacctaggaattcacagatattcttgctagctaactgcatgagaagtttgcttggaccatggctatatcacctctgattgtctgtagccgggaggtgaaacaagcatcaaaagtcaaagaaggtgctccaggtaatggaggatcaaagaatgcacaagtattattgttacaataatggatcatttggcaatcgcaatattacatcagagccgtggtgttacatcacaaagtacaatgctgtcgtcaaggtagaaaagagaactggctggtgtccaatgacgctgtctgttgcgatctgcaagaggtatttggtctttgactcaattggtcacgacgcacgacgagaagaggaagcgctaatttaatttgcttctgtgagacagtgagagtggaattctgacgtcgacctggaatttggatctgattagaaacaacaggacaagtgcgaaagcatattccaagggacatgcagctcttgtgtttattcgaataccatttgcttgggcaacatttgggcacataatacacacaccatatttttctcccttgaaaatgtgagacgcaaattacttgtatgcctatgaaacttttttattcgatatctctgatgtctcacctacacaacgtggatcacaagtcgccgtatcttctttactggaaaaagaaaagaaaaaaaggaattgcctcttgagcacaagggacaggctttattttttttttccattttacaccaaacaaagcagaagaaaagtactatatttaatatttaatttctatcaacatctgactacttaatattgctggcagaattacccaataaaaaaaaagaaaaatgctaatgacagtatcccgttcgaacgagatgatatctcggacacattgtcagacatctaataggtataagtcgtttcatctgatgtatcatcccgcctcacctcaaggacaagacgagaagcagcataaaagtgcgggcccacaaaacgaggggcccccaacccaagcctcccctgtccgtgatagagaagagaatagaaaggctttaaaaccggcacgagagattccgccgcggccacagatttcggtgctcctcctcctcctccccctcctcgccgctgatctctcccgtccgtcccctcgcctccctcaccaccgcggcggcatcagggctctccccccc

SEQ ID NO: 6575 - DNA, 2000 bp, Oryza sativa
tataaaaagtttgatgtgataaaaagttggaagtttaaaaaaaaactttggaactaaacacacccctactttactactccatacaaaacggcttgttctttttgtcagatgaataaaagctcgccgaatggtattacctaaaaaaactgacttgttcttttcttcttaatgaacaaatgtgtacggttcccgagcaacggtacgatttttttaaacacagtagcaaccgtatgattttgacaaggaaattatgtatataaatttctcataatattatctttttttggggattctcagaatattatctaatactattttttaactaaataatagttcatacctcaaataatgatcacaaatcgttcacctattaaagaaagaagtatttaatatgttcctatcctatttttataggattttggattaaaaaaaaggcagaccgtttaccattcagttgctaagggctcttttaaaaaaaacgtaaatattagagaatgatctaatatcaaatatcaagtagttagaagggatgaggttttaaacccaggttgtttagcccaccaccttgtgaagctagccggaagacccctgaatgtttctcggctcttttacagtataggattgtggaaacatatgaataggaaaacataggaatcaaatatcatgcttattggatttctacaaaatttcaaacacacaaaactttaaaaattatcgtttagttgactcatggaaaaacataaggattcgatacacaagtagtaaacacgtgaggtaagatcttgtacttatttttcttcaaaattactctagaattcattccgtatgaatttgatagattggaaataatcctttgttccacatggctctataaagattgtctcctagaggataaattctctggaatttctttatctttcttttgaacttatacattttttctctgtttcaaagggggctaagggtgtgttcggcaccccttttcccaacctctctcttgttttccgcgcacacgcttttcaaactgccaaatgatgcattttttgcaaaaagtttctatacaaaagttacttaaaaaaatcaaattaatcatttttaaaaaaaattagctaatactttattaatcacgcgctaatggatcgctccgttttccgtgcgggagggattagttcacatccccctgaaaccgaacacagcctaagtctcatgtcagcttttgctataccacccctaaatttatggccccatcgtttcgcttattcgggaaataagcgaaacaatatatttgcaaacgaaaaataatttgtaaataaaatttttatatacgtgttcttagcaatctaaaagcaaatgttgaaaaataaacttcgatgtaaaaaccccaaattcaactccgaatttaaagttaaaaaatttaaattttggctaataagtgtaatataatcataagctataagattagtactacctccatattttaatgtatgacgccgttgactttttgtccaacgtttgaccattcgtcttattcaaaaaatttatgtaattattatttattttattgtgacttgatccatcatcaaatgttctttaagcatgatataaatattttcatatttgcacaaaatttttaaagaaaacgaatggtcaaacgttggtcgaaaagtcaatgacattgtaaattaaaatacggagggagttgccgttaagtaccaactcccaagtcacaaaaggtgaccgtttctgtttctaactcagtctacctagacgtgcactccataatttgcaaaccctctaggggtgtagcagcaaaaggaaagggccaagcaagtttaatttaaaaccaacacgacccggaaacgaacaaaaagccaactccctttcgcaatttcgaaattcgaaacccacgctaaatacgacacgccggttgccagcgcagaagtaacccgaggaagaagaagacgacgacgaagaagccaagcggccgcaacctcgcagcc

SEQ ID NO: 6576 - DNA, 1150 bp, Oryza sativa
aactacaaattcagggcwtacactttcagagagcagagggaggaagaaaaaagagtaaagtgtattggtggttcttaaatttgttgggttgtgtcatataggtccctaaactctcaaaacacatatccaagtcccagaacctgtcaaagtgtatcatataggtcccaaatcaacacatcccctctaggatcctatgtggcgctgatatgacatgccacatggacgtgacgtgtcattttctttttttttcttattttctttttcttcgttttcttctcattcttcgttttttcctttcttctgctcgagtcacagagaaaggagaagaaagggaaaaaatagaagaaaaaagaaaaaggaaaaattttaaatgggacccatttttcagtcaaaatgatgccacgtcattccgtgtggcatgccacatcaacgccacgtaggatcctgaaggggttgtggcgatttgggatctagatgacacactataaaaaattctgggacttggatatgcattttaagagtttagaacctatatgacacaccgctacaagtttaaggaccacccgtgcactttactcaagaaaaaaggtcttccaggacgaaattacatgccgatcctctaatttgagtctttcgctccagagggacgcatcttcaatacacagcactaataatcgacgcaaagaggggcttcgtgcctgaagacaacccagtggtggtgattccacgggttccaaaagcattgcaagtagaatacccaaaaagtgcttggagggaactcgaatcggtgtgggaagagaagcaagctcagctaacgtcgcgtcattaacctgcatattcagcgtgccccagaaggccacagcaaaggggcactggaagcagaggtgaagagctgtttcatcggcagaattgcaaagatcacaggttggggtcggcactatggttttcctgtgcaagttgcgttttgttgggaggcgatccttagccaaaagccaggcaaaaaagaaagggttcaaaggagcttcggatttatcatcagcaagagcaattaatattcagccatttccatttccaaaccatataaattgaggtagcccttgctagtatcagttgctttgcaaagctgctctgatcagaaatcccaatggca

SEQ ID NO: 6577 - DNA, 2000 bp, Oryza sativa
tcgcgtcttctttttttaatcggcgaaagaggacgaggacgccatggacatggcatgcagtggtcgacaagagcaaaaaaataaaaaaattaaaaaatctcgagttctttttttttctttttcctttcacggttggattggtcacgtcacggtacgaccggcatgtcgcgcacactagggttgggttgatgtgacaagattgctccgtacgtacacacccccatccctttcctccttttttaaaaaatgaccccctgtttgtgcgctgtcacgtaggggacgttacgttgctgttgttggggatggtaaaaaccggccggactcgtggaatcaaaggctctaggacaggttgcccgtttggggtgtggatgatgatgatgatgatgacgacgacgacatgggttaaaggaggcaaggttagctgtaatcaaacatatgtgtacgtaggaggacaagcatacaaggactgattatataagcatcacaagtggctcccagttaattaagtactactagtcgctaatccgcaggcagctctttaagtggaaaaaaaaaggatagtacttgattagtcttgtcatgattatggtatttttgactaattgtgatttccaactcataaaatagaagcatcaagtacataattttttatacctataatatatgtctgcttattaacatagaaagtaatgtctcgagatatttatgtactaactcgatggacccgttcctacttttaccatggcttttattagacagactgtaagcactatagtcagcgcatcgagaaagtatgtcccaagatacctaatgctcccctctctgttcaccggagctctacgtatataaaatattgcctacacctggttgaatatattctgttgagcgattaacattctatgtagtaggagtactccctccgtcccacataaaacccattcctatcatgctaaggtgagactagtgaagagtaaaaatgactaaaatacccttttattattgaaaaaaatagtaatgttgaaaggtaggtaaagggtttttaagggagaaaacttttcgttttatgtgccaaggttaggtaggatggtagaagttgattttttatgggacaaaatttaaactatagaagttgattttatttaggacgaagggaacatataacaaaattagcaccataagaccatattgttaacccaaataatgaaatcaatacttcatgataccggtagaatctggaggacgggactggacaaacacgtaggaggagcagtactagctgtaacacagacggggaggagttcacaaaccaacacgggctacaggttacaaggaacggtagtagtactccagtgatacaacagtggtgccccacgggaacaccagtctgcgctgcgtgcgatggagagctgcatatgccgggatggtggatggatctctctcatcaccattagagcatatataatagcagactattagccagatataaacatattttaataagataagtgatcgcgggctatagatatgtagccagctgcagcacgaacttcaagacacaatatatgtaatatgtgagaccatatattaataatatattaaataattattgtacgaattagctattaaattggttatagatgaattaaagctagtagtgaactatactattatactattaaacttgctcttacggccgtggttacaccgacccgacagccgcttacatgagcccataaaatacggctttttcaaaaccccctcgcttcccaactttttaaaaactcttcagacactgtgcgggagctcacgctactgtacggccccctgcgctgcgccccccctcgtcgcgcacacgcacacacgcactcgcactactcgaaccacgcgaacccctctctttctctctctctctctctctcgcttaaatgccacaaacctaatcatttccacccctcttgcgctctctctctctctctccaaccccaccctttctccccacc

SEQ ID NO: 6578 - DNA, 1720 bp, Oryza sativa
aaaaacagatttcgcaatttagggtttttagaatttaattttcccgctaggcgccacgacggaacgggcgctacacgtaatgttcaatagttaaattttggttttttcttccgtggaatgtgtacagattgaatgttgtactgtagagtgatatatatatgacattgtgatatatgtagttaatttttaaattttttgtagcatttaaattacatgcaagatattactgtagacccgattttcttagaaatcaaaacataattggacattcttcttccgacatgtagaaatatcgtcaagacactctgggtgtgtttagttctttggtgtaaagtttttgaagtatacggacacacatttgaagtattaaacgtagactaataacaaaacaaattacagattccgcctgtaaactgcgagacgaatttattaagcctaattaatccgttattaacaaatgtttactgtagcatcacattatcaaatcatggcgtaattaggctcgaaagattcgtctcgtaatttacatgcaatctgtataattttttttccatatttaatatgacgtttttggccaaaatttttttgggatctaaacaagacggcctcagggtactttgcgctatctctggaacaaaaatcaatggtcaaaggggcaaaatagcatgcatttccacaaaaattcatcattctcctccacaaaattgaaatgtgagggacacaaaatcaggacttgctttttttctttcacggaatatgcaaaaggaaaatccatgacttgctgtctgtcaaccacatgctcatgactgatctagtccatgttcatgaaacaaaccatactagcatggaaaaggttgttgacagacaacaagtactttaattcttcctatttcttctaacctagcttattatctctctctctctcttgcggacattgcaagttttttgtgacacacatcatacatataaaagatacatataaaagggggcgtatattttcacgtacacctcgagagattaattaatattgcaaccaacatattgttctacagttatgcgcctatataactataattaatttaatattgtactggcggctaaagctacgtacctaaccaaggaaacaacagttgacaggtctgcattaattcgcacatgcacggcatgcacaatcacctatacgtacagatgttcacgtatgtgtccggctaacgcaagccaaggcagcagcaatgggcaacatatgcatgaaggccagaaaacaaattaaaaaaccctgtaggcgccaagtgtagcagctgaccgtgtgcttagttagcttgccggtttgatcgcttccaacttgtgaaaattttcttcgatcacccgttccattcctaggagcagaaatggtggtgcaactgacgcatgcaaacgacaaattttatagtgatcgcttcaactgcaactgtataagctacgtacaaattaaaagccgtgtacgttctttctttaatcctccactataaatacgtggcccgagcgcgtcacaaagctatcaatcagatcgagcaagacgaacagaccagacgagagattgcctttttagcaggaaaaggtgaacgatcgatcgatctctctcgcagtcgtctttgttaatttagcagaggacttggtagcataattagctagctaaccgttgcattatattgcatataattagctagctagagctggaatc

SEQ ID NO: 6579 - DNA, 2000 bp, Oryza sativa
tccccatcgcgtccaaggtgctggtgaagagaaggttaatcgagctgccgccatcgatcagaactcgcgcgatcttgatattccgaatagtgggttcgaccacgatcgtgcacaacaatcccatggcaatatccgattgtgatattccgaatagtaggttcgatcacgatcgtgcataactaggaaccctgacaatatactgcacaacaatctatttgtttcaatttttttatagttatttagttaacataataaactggtggatatccatggagtgattaggatccatctccgagaggatcatcgtccatcaaagccagcacaatgtgcgcggcctatgaccattgtttttcccccacggcagacatcactgtaagagctacaacctctaccattttgttagcctatgtagtagtacatcgtacaagtatgcatatttgctactagtcccttcgttcaatattataaattgttttgatttgtctataagttaaactttattaagtgtgaacaaatttataaaaaacttagcaatatctaaaacaccatattagtttcattaatttagtattgaatatattacgctaatatgtttgttttgtgttgataatgttactatcttttgctataaatttaattaaacttaaaatattttaactagaaaaatatttaaacgatttattatataaggggcgtttaactttttgccacttttaagtctataatatgtgaatccttatatatgtatgacatatggtccagtaatcttttaagagttataaatagttaaatatctcgttatatggatggaagaagcactgatactactcctatttggtgtgtaaaaccgacatttgttcgtgcgttcatttaacagccgtactacactaccagtacgacggtactacatgtcactacagaaaagtaagcggaatgttcttcctcttatctctcgctcgccagatctgcaccgcgcggcgcgcggcgcgtgacggatcatcgaagctgatgacgagtcaaaaaagctgtactcctacccccttgggcctcaaatcatcgagacgcgggaccatgcgatccgtcgaatcgaacgggagcaggcaatccgcycccccgagattggttgggtggttcgccgcttgcgcgcgcgcgctgggctgcgtccgctagttcctcctccattcctttgccatagaattctccgcgtcgagggggccggagacgtacggcgccccgcgcgcacgtggtgggacggcgacactgatctgagccgccgctgcgtggcgtacgtcggcattgcaacgtgtggcgccagtggcgatctcacgggcgcgcgcgggaggctattcaccgggcggcgcgcgtacgtagcccccacgtagtttttgccggtgcgggcaacgccgaatcgcccgatcgagcggtgaacaggtgttagagtgggacggcggcgcggtggattcgccgttttcgcgcgcgcaacacctgatgaacgcggcggaatagttaatctacgggacgtgactggctgctgcctggcagaatgggatgtctgttcggtcgggactcatcagtcgggacgggaccaacggtgattattaacatgatctatatctatctatctctcccaaatgattacgggaaacatgtgggagattattattggtgggggccaaataattccatgctgggccgatccacgagccaacacgcgtatcccacatgggctggtctccgtccggtcaatgcaacagccagcgagcactaatccctgacttcgattcgatcgttctgagatacagatcagcctagtggagcagagtggaacagagcagctagcttgccatgcgagtctataaattgcacctgcccggggtgttcggcatatcacacttgcactgagcactggacgcgtcacattcacaacagcatactatagtcagatatagttgtgattaattagtgagtagagtgtgatacctggactttgagagctagaa

SEQ ID NO: 6580 - DNA, 2000 bp, Oryza sativa
gttgaactaactagtacgatagcatacagagacccgaaggtaagtaatgccttgtttagttcccatttttatttttaaaaacatcatatcgaatatttggatacatggagtattaaatatagataaattaaaaaaactaattgcacagttagaggggaaatcacgagatgaatcttttgagcctaattagtccatgattagccataagtgctacaataacccacatgtactaatgacgaattaattaggctcaaaagattcgtttcacggtttccaggcgagtcatgaaattagttttttcattcgtgtccaaaaacctctttccacatccgatcaagcgtccgatataacacccaaaattttcttttcgcgaactaaacaggccctaagcgtatgtgctactctagcctctgaccagcttagtcacgctcagcctcctcacatcatgtctggcccgtcgtcacatccgctcagaacatatctaaatcatggaaaataacgattaactcataatttatcttgttgccacggtatcctcgctactagaaaaaggcttttcgcaagcggccaaatcatattttcgcaggcggacaagccatccgcctgcacctcaacacctgtgaaaatagttgattttcgcaggcgggcaacacgtccgactgcgaaaatagcttcgagcgctaaaaaaaaaatgggcagccaccaccggacggcggtagcttcccgttcccaatccatttcccatccaatccattcaattcatccaaaatcaccatccccatccaatccattcaattcgtccagaatcaccgagtcaattgtagcaaagaaagcaaataaagacattcaaaaaaatcacggccgccgcctagtcgtccgccaccgcccagccgtcgtccatcgccgccgctgcatgtccgcgccacgccgtcgtccgccgctgcatgtccgcgccgcgccgtcgttcggcgctgccgcacggccgcggcccgccgtcgtccgcgccgcctccgccgcctcaacccccctcgccgccgtggccacaccgcctcgccgccaccgcccgccgccgtgctcctcccgcccccctccggccagatctgggagggaggggctgggagccgccggccaccgttctccccctgccccctccggccagatctgggagggagggaccgggagccgcgccgtctcgaccctcctcgccgctgccgccctccgccgccgtcgccaggagcacacgtcgccaccgccccgcgcccggccgccggccgccggcctcccccctaccccctccggccagatctggaggggaggaagggagggaggggagccgccgccccacgccgtcttccccgccggccgccccgcgccgtccgccccttctgccggtggggagaatgaggagagaggagaggtgaaggggagggaggggagaggagaggagagtgagggggagaggaaaggacttagaaaaaaattcgggccatctgccatgtatatatatcacgctaattttcgcaggcgttgcttaagtggtccgcctgattttcgcaggcgccgcttaagtggtccgcttgcggacatcaaatttcaccctgacttatatttttgtagccggtcatttggctctaaacgtcatgtccgcctgcgaaaataagacccttacgttgggaaaaatgctttttctagtagtgcatgtttcatagtttttctgttaatatttaaattaaaaaatgttagccataccttcacaagaaaaaaaaagtcctagcatactttttaattattgacgcgtcaaaattaactttttaagaaggttacattgttatagcggttttgctattttacttacaatagatttttcagctcttttttttatttttcacataggatcttatatcaagattcaggttctctcgccgtctagcgcgtctcctgtcctgcacccgcgcgcgcgggctgtggccacaggaggaggtagaggtcggttgatcgag

SEQ ID NO: 6581 - DNA, 2000 bp, Oryza sativa
gaagaaatcgtgctccctccgatgaccctgctgcgccggagacctagatggctgaggaggccggtcgaggatgaaagcgaccatgggagatcaacgggatctagagcttcaggtggatcgacgggatccaagtcatggcaagatcgatttgttttgatttgcttcttcttttttctgaatcatgctctagtggcatcatattgtagttctttatccgagttgcttcgattcatcgatcttgtatggagtattttttttgtgattaattttttttgctgtttaaactgttgttatggttagtttggtctatgaccaagaccgaaccgaaccgaactaaccgaagaccgaagtgttcggtcttgagttttcttgaacaccggtcggtcttatgattcggaagaccaaattttccaaaagatcgaggaaccgaaccgaacttttcggttagaccgaatgcccacccctagctccacctcttctacaattggtgttcagccaaacagtttcagctccatctaaaatgggagcggagctgggtggaattctgtcacaaaatgaactagagagatggaaatgggtttcggcagctccacaactccactccagacccaactcctgaagctaaatttaggagttgaagctttaccaaacaggcccgtagtagtacggtagcatcacgcaggcgttggactttgggggataggggctgttagttcccatccatacatggtcaccatttgttaataaaaatattaattaaaatgaaattattagccataccttaacaggaaaaagaaaatactagcacactttttaaatcattgacgcgtgaaaactaacttgttaaaaaggctatattgtcgtaatggttttgctatttcacttacaatagattttttgggctcctgcttttttacctttcatccatatataggatcttgcacatcaagattcatgttcctgaagacccaatttacagttacagtgcacttaaatataactgtttttttaatttatgatttttgatatattgtctttttttatttcattcaaaacaaatatatcccttgatggaaaattctgtaagatttaaactacaaatctactattgaaagatcaataccttgttataattgtggttagtttcaaccaataactattcaaattaatcgaacttatctaacactagtatacactccgtccgtttcaggttacaagatgttttgacaaattgctttaactttgatcaagtttgtagagaaaaatagtaatgtttttaactcaagtcaaatttattatgaaaatatattcaattattgatttgataaaactaatttagtattataaatattattattttttctataaacttagttaaaatttaaacagtttgactttaatcaaagttaaaatggtcttataacctaaaacgggggaacaatatagacgtgtatagacgtagtagagtttaaaaaaacatagacgtagggtgtgttcgaggagaagaggattaaaaagattagaaagatacacaaaacgaggtgagccattagctcatgattaattgagtattaactattttaaatttcaaaaatagattaatatgattttttaaagtaactttcctataatttttttttgaaaaaacgtactgtttagtagtttaaaaagcgtacgcgtggaaaacgagactcaatctccccagtctacccgaacgaacgatgccgtagttaaccgtggtaaagtttgacttagtagtgtattaaccaaacgctaataataagtacagcggcgtcagcgagtacgcacgcacgcgcatgctgcgcccccactccagtggaggagtactccactaggcggccactcctgttgacgccgagtataaacaaaacccaaaagcggcgagagcaaccaaagcccaagtttgtggggggcaatagctcccgtcgtctctcgccgtctcgtcacacgaggaggaagaggtcgatcgatcgatcgag

SEQ ID NO: 6582 - DNA, 2000 bp, Oryza sativa
ggtaggaccacgaggggcgagtgcctacagtggtgtcaccatcggtaggactgccatgtgtaaacctaaacttaactataacttaatgcatgtgtgagtcttcccttcccgggagagccagaactcctctcactgctagaaaccttggacgcctagagtgcatgaggactaaagttcatggagcgggtactgccaaagtggggttattgaaaggctttgccgtggcaagtctcattcgttgggacgtaggctcatgtgttgggcaagtcgcggagtacgggtaaagtgtacatccactgtagtgtgagtaaaccaaatctattcgaatagtcgtgctcgtggttattgagcaccgggacatatattacacttggctagactctaatttcttaatctgattgggtggaatgttgcatgatgattttgtactggtagatcaacttctcgagaggcgagaaggggtagaccccagaaaaccatgacgaccagtggcaggaagctatccttgggaacacaatggatagtggacacaaccgtcgctgtttaatgaacaatggaattaaaacatgattagtttatgctaggtcttaggtttgtgaaatgatatttgaaaactcagctttacgcaaagtaaccatagccactcgttgtattatcctatacattactgcattttgtgtggtggcttgctgagtacttttgtactcattgttgctctatatatatcttttagcaaagtgttgaagagaagcccttgttagtacgcttgcgtacctaacaagctgatcggagtgcggttccattctaggtctcgggctagatattattttgttttccgctgttgttctctgatagttgttggcctacctggccctaatgtaagcatttaactctcttagcctggattcattcgtgatatgttgtgattcggctatgtatgtgtgtaccaactactgattcagggattggtactgataaacacataagatttccgatttataaaatcggaggtcgacagcccgccccatcatatctagccccaaagaactactatcgaatacccggtatcataaaccccacagatcctactgcaaatcaaagggctgccaatttgccaaatcatattctcacgccctacctaagggctgccaatttgccaaatcatattctcacgccctacctttttctcgtctcttgtgtctatttgctgttggatccgctatcactggcccactgctagttaccgactactcggctatggcaattttgccgccagcccattccactacctaaccatctctttaaggttggcgaattccctcctcctaccccgatcttaatatgggatcctaaacttaagtcgccactatctcgctggctttcaaggagaaagagtgacaaggatctaatggtgaaggattcatcagatattcaactcaaatttgtgtcaaatgaaggttagcaattctgctaaatatcccatattataaacaagcgtttctcaaaagaaaattgaaaaataagtacaataataggcaaatggatctaatattcttttttcattggaatggatctaatattataatcttgaccccgcaaaaaaaattctaatcttgagaaactcaaaatgtttttgaacactgatgaaatttgaaacgaggtgccagtgtgccacaaaacatgtatattgccgcgatatgcgccatgcggccatgccgccatgtgctcctcccctgatgcatgggttcccagatgacagtcgaccagtcgcccagccaggagcagccttcctccaggcctcgtctcgtccttccacaccacgtccaggtcatttccgcctccttttttaatagaggaagagcggaagacatggcgaagcacgtcgctggaaggacatgatctacgcacacaagccattatagctcggggaagagactcacagagaggaagtgctcccggtgcttccctgctcgtttggctgctcgccggccgcgtccgcc

SEQ ID NO: 6583 - DNA, 2000 bp, Oryza sativa
cgtgtatcctatgtattcactatagtgggagatacaacacctatatgctcgagcatgccatagcaacaaaaatattataaaataaggtgttgtaattgtgctctcttttcttttcttttatttttttttacccttttctattcgagattaggaagatgtaaggaacttctcataaggagctaccacggaggaacaaggggttgcaagtttgttcgatagcatggaagaaccatatatacacaaagcacataaacacaccatgcatcacacatgtacatacagatgactccacttacatacatgtaatttgtgagcaacataatttgaactcacccttatggttcagtcctcaccccctccataggcacacatgtttataccaggggtcagcgagtgattttttttaaaaaagacttgaaatttgctcccgtggaaaatcgaaactaggacctggaggtgctacttgagcactataaccactaggctacaggcagggcctacatatctctctattttttgtgtgcatttttattcaatctgttgtataatgtgtgttttataagttgaatgtgtatatttggtcttcacttgtctagattcaatcttgcgtataaattaatttatagaacatcaatatcaatatcattgtcacatwacaaattcattacatctgattagaccmagacattttcctatgatatgttatcatttttcattacatctcacagaacagtttcattatatcaatatcatattgtttgttccctaatcaccatcatatataccatattggcytgattgatatccatcaagttgtttaaggagttgttacttgcctttgagattgtttcattactagacaacagagcgcgtcctcgtccttgtccttaacaagagtgcatgtacacaactacacgctaagaagtactacctccgtcccaaaataaatacagttataaaaattcgtgttcaacgtttgactgtccgtcttatttgaaaattttataattttttttaaaaaattagtcacacataaagtactattcatattttatcatctaatagcaataaaaatagtaatcatatttttttttcaaataaaacgaacggttaaacgttggagatgaatagtacaaaactatatttattttgtgacggaggaagtaagaacaaaaggactcaaccaatatacaagtctactctcatgagctgtctagttaacttgttttaaataatcaaataatacatccaagtgaaaagatctattatgtgcaaatatagaaaaaaatatcccttcttatattagagtacgtacaagttgttactgttgaatacaagtcttttgtggacataggggtgggcattcagtctgaccaaaaaatttggtatcagtcttcggttcggtctttgaaaagtgaagaccgaatttcaacgcaaaaatgctaggaccgacaaattcggtctcggtcctgatcggaattcaacaacattttcatatatgaaaaaaataatagaaattttcaacacaaaaatcaaaaaaaaattcataagcactacgaggtatatgctttttttaagtgtttaattataaaggaccgtaaaagtataaccttacgacgctttttgggtaattggtctggctagacccttaagtgttgtactatctcatcaatgaaatatcgatatgggacaactgaacaagctaacaatacttatacactgttcacaacacttatcaaaacagtccgagttatcaaccaaacctcacggttgcatcacccaggatgtgtacatctgggtttggatatgagggaaaatatgtagtgtaaaacatatatatgtatataaagtgaaaacttagaaactaccgtttgatcaaaaatggacgtccgaaattcgtccgcgtcaccatargtaaaaattttactcccagttcactcatgagtaaaaattttactgaagtgacgtgaacgaatctcagatttttaattttcgatcca

SEQ ID NO: 6584 - DNA, 2000 bp, Oryza sativa
ttaatgtgagaatttctaagccatgagagtaaacgtggaggctcctttttctattcctttaattatataatagatttaggagtgtaatatttaattcattactataaacaattgtcaataacctatccaaatcatgcatgaagaatggaacaagtactacaattgctacgaaaacagttcactaacatcacaagaccaaacattgctacgaaaacagtttcactaacgccacaagaccaaacattagtatcgaccttctaagataacaatcacaagaccaaggcctatcttacaattcacctccatccatggtattccataccttctatctcgtgacgaagatattgaacaaaacatagtatagttaaccatatacgaaattcagtctgaaaaatggaagttcatcagactaacctctcagggattcatgtcacaggaattcgtttaagtgggtcgctctaggattgcaaacataggtwagataacgsaaaacagacaccgagtacttagggagataaaactgccataagacaaattgcagtgccacataacacatgcatcacattggattcatgagcattagcacaaacytgattcagcagaaagccatccytgctagagtacytgaatacatgatatggtctgctaaattaagctcctaataacattgaagtatgaagcacagtagacccacaacttcagtatccagtaggtagtttagaagagacgttcccttgcccttcttgtctccaccaattttaaaatgcttgcacctctgcacagaataattatgtaagtgagcatccaacacatctaaaaagatactgattcatgagaattttcagcttgaatcttcacattgcaaaaataccttgatggggtgctgggagtaatgcttgcagctttggcattgcagcttcagcacaatcttcttggtggtttttgcctgaaaacaggaaccatgtatcataacatgaaaaatgcaccctgcttttggacctggccggaggagagcaacaatgccgtgcgcggtggcgcgatggggcgtggtggaggcggtgcggcggcgtgtgtcccggcgacggtgtgctgttcccggcgaaggagcggtcgtgctccttggccgcggagggcagtcgccagcggtgctgtctggcgacgtgtcgtccgtgagggcggtgatgggcctcggcttggctccttatagtcccccccccctcagccggcgatkaaggctaggcccggsgcccccgactggtggcgtgcaaatytgsgctcctagcgkctggatctggtcgaatccgtggcaccggtggcaggctctggcctcggaacccccyttccccgcgggactggtgaccttgsccaataccttcttccatccccatccctcctccttcctcctctttgaggcgcccttgagctagccaacgagctccttgccataacatgcttggctctgatccatcaattaggatttgccagtgcctctccctctctctagatctccttttagcatgctccttgattgatggattaggtcaggtcttttatgttagtgcctacggttttctttggcttgaatggctactattcttgcagccttccctgttgacgcggttgatgttcttctagctgtaggattcccccctctaccacttatcttttgtccagctccctcttcgtctccacccttttccttggattgtcctcaaccacattgttcggcggccctccctcctttgaggcttccttccctaaaagggcgttggagggcgtggaactagctagcaatttgttatagtcggattgaagaagactcgatgcgagcggtctctatggccgcaacccatcgccgccatagacgtacggacggccggctacaacacaacacagtaactgtaactgaagaagccggcgccaccattcccgccgccaatatgctcgccgccgccgcctccgtcaagctctccacggccgggaccgccacggcgcccaag

SEQ ID NO: 6585 - DNA, 2000 bp, Oryza sativa
cttaagaagcccaaatccgaacacaacgctttgtagctgactagcttagacctgagggcctgtttgatatagctccaactcctaaatataagtccaggagtttagtctggagtagagttgtggagctgcctaaacccacctccacaactctagtatattttgtgagagagctccacccaactccattcctaattttggtggagctgaaactgtttggctgagctccagcttcagaagggatggagctggagctgaagctgtaccaaacgggcctgactctgagaggaaaggcctgactccacggtccacgcgcaccgcatggcgtacgcgcgaaatggttcacggactcgcggtcatgcacacccgcgaaaacctgcgctaagcaaaagcaccggaaaagcaacggcacgagcccgtgccccgtgaggcaatgaaccaaattggcggccgcgtcaaccacgccaccgggacgcgcgcgacggcaagaaaaagaagtcgcgaagtcgcggattctgcaggcccccacgagaccacggtttcctacggccgatctcgcggggacgcagccggagacgacgcggtcggtcgcgtcgcaccccacgccccggccggttagtggaccgattcccgcaccggcacaccgcgcgcgcaccgcgtcttcttctctatcgcgacaagtctggcttggtcatcgcgtgagtcgatcgcctcgttgctttccgtggccgcgtccgtcgccgcctcgcgcaccagcgaatccggacgtcgaccgctgcctgcggatgttgtggacagctcacagttggtgttcctctgaatgcacaggcgccgtggttcctctcacttggtgtgcaatttaccgtgaaatcccagtgagatataacctacgtcttcgtaacggtctcccgtcttaactccgagtctctgactaaccgtgaacctgatgatgcagttgctagcctcatcgcgtgcgacgaaatatcaaatgatgtcgtccgtgtttagatgacttcttttgtactcctgcactgtctgtcgatgtcatggcagtaggtgcctcctttcaccgactccacctgctccagaacaaagcaggtaccaactgttacaaggaaaaaaaaatctgtattttccaatactgtctatttttattatcttgctttgaatactaaccgggtatttattttggattatagaaaagaagtacacaccattatgcacacacttcaaatattcgtaagccagtagaaaacggaattgtgcaggtggcaagcattctcttttctaaaaaaaaaatcaatatcataaatcacattcatttttctaaaatatttaatttattattaaaattaaatcaagtagataataatacatggtaataattcaatgaataacccatgccaaatagagtcaacaacattgttcacgttttcgacaaaaacaaaatgaaagccaccaaattataaggtttcgacgttgaacacaagcagattctaagtaacttttcaaatgattttcaagaatttaaatttgaaataataaatttgattggaatttatcaaggttcatgaaaaccgtcataagatcgggatccaatgctcaattgaaaatgtgagaccctgccaacaacggctgtgtttagatccaaagtttgaattcaaacttcagtcttttttcatcatatcaacatgtcatacatgtataacttttcagtcgcatcatttttaattttttaaaaaaatttaactttacgctgaactaaagacagccaacgaatcaaagagggttatagccatcccggccgttttcggcccgggtcaaaacgttatgtatgctactcgatttcgtgcccccacacccttgacgagcgagccttgccctcttctcttcccttctctcctaccggcggcaactaccgggaagccgccgccgaccgccggagcggagtcgtcgcggcggcgagggcgaatcggtaacccccccccctccggagttccggg

SEQ ID NO: 6586 - DNA, 2000 bp, Oryza sativa
gagcggcgattggacagtacgcaatagtgttctattgttatcagattagcttttatcaattagtacttgatacaatcaattcgcctaatgcacggcctgaccggagggatcctgataggatccccctagaatttttatttaaaatacccgtgcgttgcaacgggtgaagttattttaatcctattattgttatatggtttagttatggtgaaattcactgtcttaaattcgcttggatatataccttgttagaaaatcatgagatgtaattaggagtccgatcatctcaaattaacatgcgagttttttttaaagagatttcttatacgactccttctgtatttgcaaaagcaaacgaacttaaaaaccgactcaaacactgatctatattttcaaaagcaaatgaacttaaaaaccgacttaaatatggaggacgtaccaaaataccggtaaaaacatctttaatttttataatagtagagatggtaaatatcaaatactattgtttctctccgattctttttgttgttgttcgtggctctcatcttcttattattctattggatctactactcgttggtgctgccatctgattggcatggatgacgatccagagatgtgctgtttgtgacgctccaatcgcaagaggcgagaccgcgagagcaacaagtacaccatgcgccggcgctcttctcttctcatcctgtgttactccagcccagatgtgagcatgtggcccgtgcagaaaaagraaaacagatgaaaggccacgctagggccgtgccggtgaaggaaaggagagatgggctgagccagctggttcgctagggccgaaaaaggagagaggaaaagcgggccgtcgaagaaagagatgattcagcacatcatttgtattttctactagtgtgctttttttttttggaaaatatctgaacgtatttggatttgaattcaaaaaattagttggaactaaggaaagattttaacgaaaatatcaggaaatctatttttgtactttaacccctctctccatctatttcttctcctcctatggcgttaggtgttgctactcgccattgtctcatcacgctccgccttatctatggggccttcctcgctggtacggtgctctatctgccggtgcccatcatcaccatactgggtgaaaacctacattcattcgcatctggctggtctgcatgtttcgcagagcaaatggtctcgattagtacattacaacaagtgcttttcacggttggaaaggtcaaaagaggttaagctatccacttgcccagaccaagcaggcgtctggtagatgaatgcattgatcacatgctcagccgcataatccgggctaccataacactaaagaaaagaaagtcataccacattatcacagctcgtaacataaaacttcggttgactcgcactttgatcatggagacatatgatcaaacttacagtgtagcctacatatttactgcagtagtttgcatcaaggaaaccgaagcaatgccccttgctaacacactattccattcgtcccataaaaaatcaacctagtaaagtggcacattctagtacaacaaaaagacatacgtctgtttagatttgttatactggaatatgtcacatctagtcctagattctttttttttaagaacggagggagtacactactactcctatgctgatgtgtgttggtactagaatgctggttttaaagtggagattagtggctcattagcatcgtttgaatggtggttgtttagccgagggaattggtggtgaggttaaatagtattgagcctgagcttcccagctcactgccttgtctgcatctggctgacctccatgtttgcgcagagcatctgtctcccattttgttcgggtgtttggcttggcctcccctcctcttaaattcacacacgccccacctcgtcactcgtctcgtctcgcacagtcgcagctgctgcggctgtttgcccatcaatcaagaa

SEQ ID NO: 6587 - DNA, 2000 bp, Oryza sativa
gttttatttgttctaaaataattttatctttaaaacgatctaatatatattatattagagtttatgaaagtgagaaaaatacattacgatttgttaaagtagggataattgtattgagatttgttaaaatggagatcattctagtatttttcttttttgacttatattggctgcaatagaggaaaagtaaagttattttaggatggaaataatactgcttatagtgctagctttattttttcatagcattgtttgatacttcctattttagttcacgtattttttttaatttacatataaataaaaaattacaaaactaatataaaatccatgctccctcctattactcatttactccgctggtctctcttctcctattcactccaactcctccctctctaccgccaccatcactacctcttccttctttagccaccaacacctctcccctcaagctatagcaagcttcttcgacacaaattgaaggtggcttagtaccgggtgracctatatttttaccaatttaggctgagtttaaaaaaggggagatagagaagattgggaagatacgcaaaatgaggtgagtaattaacgtatgattagttgagtattaactattttaaatttcaaaaatagattaatatgattttttaaaacaactttcctatagaaaatttttataaaaaacgtaccgtttaatagttcgggaagcgtgcgcgtgaaaaacggaacaaactatctcacagtctcacggtggcgaacgcagccttagacatgagacgagagcatcacttgcagcccaacaaaggaagcaggaagggggcgccttctgtggcagttgaggaggaggtagattggcgatgtagcacaagaggatctcattgttccctcaccatcaccggccatcccgttaagctcactgaacagcctaattttatagtcacaacctcactatcattcgttgctacatgtagcatggtgtttcaaccctctaagaccctgtttagatgggactaaaacttttaagtccctatcatatcggatgtttgaaaattaattataaatattaaacgtggactattaataaaacctatccataatcttggactaattcgcgagacgaatctattgagcctaattaatccatgattagcctatgtgatgctacagtaaccattctctaattatggattaactaggcttaaaaaaaatgtctcgtgaattagctttcatttatataattagttttataagtagtctatatttaatactataaattagtgtctaaatacagggactaaagttaagtccctagatccaaacaccacctaaggtatcgagtacaaccaatgtagggagtagtttttacggtaatgacaacccgcaaccatgcagggagggacaacacgtgtcattgggagacacggtttcagtcgaggggagctagagcgtcgatatggatggttggaacaacttacaagtgtcaaaagctacaaactatttttatcagttttcaaataaaatttttgaaaatcacttacactgttttatttttttaaagatgaatattttcgtcacgtacagtacacgctgttttggccagggttgattttaaatatttttattcagaagaaaacaatagaaaaaaaatccaaagctgctggggtcagctcagctcgaaccctgctcccctctgccgctctctttatccaacaatatttgtaggccgtagccctggcctcccctctgccgcctacgagagaccccaaaccccccccccccccaccaccacccagcccagccattcatggccatcaccaccatgtgtcgcctcccmacctccgcctctcctcacccamtccgctctccgctccattaaacccaagcgagggacctcgatcgcctcccctcctcgcttccctccccgtctctcctctttcgaccgcgttggaagcaagcgcggcggcggcgcggcgagctgccsgtggggggttgcggct

SEQ ID NO: 6588 - DNA, 2000 bp, Oryza sativa
gccatgccccacatctagttttttgaaatccccacatcacagatcatccaccaatcacagatcaaaacatattcaacaagaaaagcatccacaaatcaaaaaacatcttaaaagaatctacaaaatcatcccaaaaaaattcctcaggcgccgccgcccgccgcctcccctcccaccggatttgacggaggggagtgtgcggcggccgccgttgctgtctccgaggtccgccgtctcctcttcggtcggatcgagcggaggggacagcgccgcggcagccgccgccggccgttcccaaaggtccaccacctcccctccggctggatccggtggaggggaaggcgcggccgccgccagccgctgctgccgcctccgcctggccaccgccgaagcccgccgactcccaactgcctccctccacaggctccctccacgccgccgcctctgtctgtgggtgcccgcagcttccccatctgtcggastggmggggaggaggscgccgccgcygccgcctctgcctcggccgcttgccagtygcgcrggcttgccggcttcggccrtgccgccactgccgmgacagacagagagagagagagagagagagagtggtgggagagagacgcgagagctgagagacgagagaaaggtagtagatggataaggcggagagacgagagaaaggtagtagatggataaggcggagaaacgatttgataaggacgcgtggtggtgtggtgcttatgggctcggctcgccggcttggctcaaagctataggtgccggttttttaaaaaaaccggtacctacaatatatgataggtgctggtttttttaaaaaaactgacacctatagtataagtgccgggtttttttctagaaccagcatctatatatattgtttaaaggtgccggttctattttttccatcgtagggaggtgggaaaagctctataggtgtaggttttaaatgaaccgacacctatgagccgttctctatgacggttttttagtagtgcatgaaaatttggcggaccgattcgacccaacactctcgcgtgaatcacgtgaggcagcggcgaggttgaccacgcgtcgcagcctcctccctttgtgcttcccctccctcactggcttctcgtccaggaagcggctgcggcggcggcaacagcgacggcggtgttggtaggaagcagtggggaggttgatgcgcgagggagtagtcgtcacgacctctttccttctccctccacacttcccctcttgtgccatcttcttgtccaagaacggaggaggcggctcccagcgacatcactctcgtgcccttctctttgtgatagctggttggttgcatgagactattgaaattcctagcgatgatgtttttttttcaataaatttcatcagaatagaacaattttttatatgaacaagtgttaagacaattctgaagcagctatatatagtgggtggtctaattaattaagctaattctaagacaattctttgtgaatccccctaagcctagcctaggagaccctctcccctttccacccttccctgttccatttgtaccctaactcaggaccctaactaatcacgattgcccgttgcggatcgtcagatttggaggagaagcccactagagtacgaatcgcgaaaccgaattgaagtttataaatttgtcagaatttatctttattttactatatggaatgtggtttacagattcccgataataataactaatagagtttgggaccatgtgcgtatgtacctagatagggagctcagctcattgatgcacatgtacatgcgtccatgtctggtacttacttgcgggtaactagcacgcacttgcactaattggatagatccatccatcacgatcgagctcacctatggatgcctacgctatataccacacttaaaatccactcttgcgtgcgtgcttggtgtcagtggaacaagcaccgaagaacgactatcgatagaagttgatg

SEQ ID NO: 6589 - DNA, 2000 bp, Oryza sativa
ctaaaattcatatgggtagtttgcataattttagctgtcaccgttggcatttggaagaccgtttcccataagaattaataatggactgaatggtaaaggatgtctttgtgagctcatttcgaccatttttgtaggtaccttgatggagtatttctcatacaggatgaacaatatgatgcttgtcattcaattttgctttttttgttgatctatagggttgtgattgcaaatttacacgtgaaatgtagtttgaattaaaaataattcattcgtcgcgaataaatgagatgatgttttagggtccaattaatatatctaatttattacatagctaaacattattatatccttaaaaagaaggataagaaaagtggtctaaatatggttgaataaaatatctcctaataaatgctaagagccgacgttgagccattgttatacttagcaactatatttttctttcctctcatctctttcttccacgacactaaatttaaatttacttgcacggtaataaagagagtccactaataaagaacgttgtacatgttcttaggccttagctctctgctttagatttttgagggccaacttgatgtcaatatgggccatatatgttaaaaatgccctaccaagagaaagcgataaacattaagagaatagtgatccaataatatgttaggaaatatattgatagagccctttttttgaactttcagcgagtatttccctacgctctatgggccgggacgggtgagaagtgagaatgagcgtaataggatgggaatattattggagccatggagagtatttcctaccgtggtcatgacagagagaatttgagctgcatcgcactgcggtgggttgctgtcgtctggtggtctatactccatgaatgaagtactgtaaatcccatgatgaaggttctaggtgttagggcatgtacaacggtctttattagtagtctctctctattgccatgcaagtaaatttgatgacatggaagaaagagaaaggagtatggttgttagggcatgtacaatggtctttattagcggtctctcttcgttgtcatgcaagcatatttgatgacatggaagagagaggaagaaggaaagagaaagatggttgctacgcatgacaacggcatagagtcgactcttagcatttattaggaaatttttcgttgcatcgagtctaacaaaggaaagatgactagtaaaaaagtattttggtacattaatgattagagatcatattgttttaactattgtaatatggtagcctctaattgacgtagagaccataccggtctctacctttgtacttgcccttatgtaggacaacggctcagagtcgactcttagcatttattagagcaaatttttttgcatggtggtgaaaggaaggaaagaagagtaaaaaaatttatttgaatacattaatgattagagaccatattgtttctatctgttgtaggatgctaatatctagataacgtagagtttatatctgactatatatctttgtacatgcccttattccgctccggctgcaacatcattaccttccttacataatccatatttctttctgttgataacgatgcccttgtgttgttatctgacgggaaaacctccaatcagatggctgatggcggcagaccggttccgttgttccggctgcaaaacggccgctcatgaaagctccgttcacaagatacaagcaggccgacgccctcacaataattttctgatcaaatgatgcgtactattgtgaactaatctaatcaggcgtgatgcagacacagaaggaatggcatctgagccgcgaggagggactttcacgaccgaatcaaaagcagcagagccgcgacaacagacgcaccggcgtttgacccgaacaaaaaccccacgctgcacgttaactccactgaaaaaccgagctctctcactcctcacaactagtacgttcacaagcaccgtgacagccagctccaa

SEQ ID NO: 6590 - DNA, 2000 bp, Oryza sativa
  misc_feature (1)...(2000): n = A,T,C or G
tgaagccggcgaaaggcaacgttgccggggagctgaggatgatgcagatggtgaaccacgccaacctgaccaagctggccggcatatccatcggcgcggacggcgactacgccttcctcgtgtacgagttcgccgagaagggctcgcttgacaagtggctgtaccagaagccgccgtgctcgcagccgtcgtcgagctccgtggcaactctgtcgtgggaccagaggctgggcatcgcgctggacgtcgcgaacggcttgctctacctgcacgagcacacgcagccgagcatggtgcacggcgacgtccgtgcccggaacatcctcctcaccgcgggcttcagggcgaagctgtccaacttctccctggccaagccggccgccatggtcgacgcggcggcgacgagcagcgacgtgttcgcgttcgggctgctcctcctcgagctcctctccgggaggagggcggtggaggcgcgcgtcggggtggagatcggcatgctgcggacggagatccgcaccgtgctggacgccggcggggacaagagggcggcgaagctgaggaagtggatggacccgaccctcggcggtgagtacggcgtggacgcggcgctcagcttggccggcatggcgagggcgtgcaccgaggaggacgcggcgcggcggcccaagatggccgagatcgcgttcagcctctcggtgctcggacagccgctgtccgtctccgacgcgttcgagaggctatggcagcccagctcggaggacagcatcgggattgggaacgaggtggcagctagatagatcaaaacacagcaatgggtatgtataacactgttgggtagtgtttggttgcaaggtttgggatggaatgcgatgggacgaacccacttttaaataggtttggtttaggggtgagcgggatgggttggtccctaaatagaataactcttaaatccgggaccaaccgatccggcaaaatcgagcggacgaactcgtcccacctgagatgggcgcacggcatgagtcccgttgctactttgctcctcgcatcagtcacctggggatgctcgacgagagcacgtcgggctcgagcgacagcaggcggctcagtgacggcggcnagtgaagtttggcggtagggagggcggcggccggtggatccgaaggccggggactcgggaaccgccggaaaatccggaggcaaagcacgactagccatagcacgcagaaataaaggagacccaataaggggctcaatcgcggaccagtaagacccatgaaccagctagaccaaaagacaatgcccttacatatatccctgtcacgaggacaattatgtaaaatcattagcacaccaaaatttaaaggttgtaaacctataaatagatctcaaataatgtgtaataggagatcaattttagagagaaactaatatactatttattattttcctttccacttaaaatgaagcttgactttggtacaagcgtttgtccttcgataacagtgtgtcatggcccatatatatatatctgggccttaaaaataaacttgcgtttgtacgaactcaaatgtgattcaatcctttgtccaagcatgcactttacattgctatcgacttttcatctgctacggaattgttgccaccaatccacctccacagctccactacctccactccaccgatcaatctgagccactacgcctatatttaggcgtgaatggcagaagttgggcacgcgacgtccggcgctgctcgtgccttcctccgaattctcaacaaactccgccatgttctctccagttcccacctaatatctgaggatatcaccaacgtccatataaacaagataatcaccgggcaaattactgttgctgctagttcaccatttgcgcatttcctcttctattacccgcattgttcaactgccatttctctcctcaattccaaaaaaaaaacacatattcattttttttctcattcgagctaaaccatttcaatcc

SEQ ID NO: 6591 - DNA, 2000 bp, Oryza sativa
atgacagttccagtggtatttttgcaattttctagtggcagttttacaataacgattcaaaacagtggtaaatttgtaattgtcctataaatttaccatggtgttctgctatcatcatcttgctcatgtgggatttgggaaaggcagaagctggaagcgaggattgaggtttccaaaaacacaccatgccaaagacatatgaggcacaaaaattgaaacaataaacttaaacaataaggataaatcaatgaaaataggatgtgggggcagtttagaaaagaaattgatggggtttttgttatgaaattgagttgttgggaggaaatagaaacccaaacaacttgtatgggatatttggatggtcccctattgcatttaaactcgcttaaaaagactatctactctcttttactctatctgtactaaaatataattacttctattgttatagaactgttaaaaatatagctacttttctatttgctctctcatctcaaacaatcacaaccattccccatttaattttttttcacatattttctcatcctaaccaatcacaaccatatctcatttatttatttatttcatctacttactcatcccaaccaattacaaacatccctcatttaattccatccctctatttaatacacgtgaaaaactttagaattgcatatattacgagatggaggcagtaggattttgaccatcaggtctatattaaaataatactttataagacctgatgggtttacaattttactccctctatttcatattataagtggttttgatttttttttcactagtcaaactttgtttagtttggccaagttcatagaataacttagtgacatcaaattagtttcattaaatttaacattgaatatttttttataatatatttgttttttgtttgtaatgctactatattttttctataatctttgtcaaatctaaataagtttgactaaaaaagagacaaaacgacctataagatgaaatggagggagtacaataatactctccaggataaatttacgcatataatttttgtttcttttaaagtaagcaattgaaaattaaatttattgatgactataattttagaagtttcgatcaaattatagtcccttcgtttcaaattacatgttgttttacgtttgtatttgaccattaacttctagaaatccatatagtccaacaaaatgtaaattatatatcacaatcatatttctcatgttaaatctaaaaatataaatcgtatgatgttaaagtatgagtttactcatatagaaattgatgatcaaataatatttgatttaagacaaacccagacagctaattttaatcttaaacctcgaataaatattcatgaggcaaatcctctgtaagacaggtaggggtaggtgcctcccatttaggtgattaccagatttgcccttcgtactgcttagagtcatgcaccggcacggttacggcaagacccggcggatccgagccatctgacatccccactacttctgccgtcctccccagaaaacgtgtcacccccggttcgcggctcggccgcgtcgcgtccagtcccgcaggggcaaaaccgtccttcagactctcctcccgattcgtcgccgcccagcagtccgtccgccccagaggcccccaacccccaggtctctccccytcccctcgcatccataaaagcagccccgagccgcgcgtggccccgaccaagctcgatcgaagctctaactctcctctcttctcttctcttcttccgcgacacgtcttcgccgccgccgcagccgccgtcgggcgtcggctctcctccacttaccagaaaaccgaatcaccgagaacttctctctctagtattcaaggcgagagattcccaccccgcgattcccttgcaggccgccagatttgtgggccttgtgggggtgggcgctccattaaacccgagagaggggaggcacgcgcgcccgccgaggggcagcgca

SEQ ID NO: 6592 - DNA, 2000 bp, Oryza sativa
gttttattttttataacaatttctgaagtctctgcaccagaacttgttaattttctgcacaaggcagtcgtctgttttctccgttttactgcaacagcaacaaaatgcagcatctacagaaattgcatgatgagatatatagatctaagagagtgaaagctccttagcattcctgaagcaacttgtgcaatttggttgctgcaatgcaaagttgcagtaacttgtctgaatcacgccctggtgatgtcggtgatggtgatacgaaatccgacgttcccgatgcatccacgtggtcagcgtttcaccgacacacgctgctatactattccttaatcattttctggtctcttcctctgttgtttcagtcgtcttcctcgtgttgctcatggggaatataggagtattatcatatggatctgtaaattctgatttctgaacacatatgcatcgcgatttgaacttgtccttccatctgtttctctttggaaacaaatacgtcacgaatttgcatgataagctgttggattaaacgataaataattgcaaagtcgctgtatgcatgatctttcagaattctttctctgacttaaccaatcataatcaagcaactactctaaagttgtaacggcaacgttcgctcgtcgagtcctctgctgtgcccagaggaataaagaaaaaaagaattgtccattaagaagctgaccattcaaagaaaaactttcatgattggaactcacttggggccatgaagaacagttcattgcgatttgcaaaggtgatttggtcatcctttcctggcactcaaaacttgaggaattaaaaaaaagaattaatcaatcagctcgttacaaaacaaacatgaagaagcaattaacccaatgttcagatcactgcaggcgtgtcggttggatcgatcgcaaccgacacgatgatacatcgagacacgaccatcagattaaacgaaaggattaattactgcaagtgctgaagctgttcttgcttgtgtgttttgcacgtcgactaactaacggcctctcacgccatcgcctactaagctagcgtgtatgcttccaacaactatatacttcgatccctctgtccttaaatatttgacgccgttaacttttttaaacatgtttaatcgttcgtcttatttaaaaattaaataattattaattttttttctatcatttattcaatgttaagtatacttttatgtatacatgcatacagttttatatattttacaaaagtttttcaataggacgaacgatcaattatgttttaaaaaaagttcaacagcgtcaaatatttyagagagtatttcmatttgcaaccaaccaccggcgagtcggcgacgagtggaattatcatggccatgcaggacgacgacgacgacgaccagcacatgcacagcatgtctcgctggcgcgcggcgacggcggcggccgggagagaacgtgcgtggtgacccaaaccttgacgcgcagaacacaagctgtacactaccacttctctaattctttaagtacaaaccaacacgtagcaccacctacctaagctttagcttcctctcacattccactcctcacatatatatatataccacattgttgtcatggcacggctcctactccaatcaatcacaaccaacgaattagaatctaatcaccctgtcccattaaccaaattaacatcgatcgatcattagtacaaactaattaatcaatcaattagttagagatcaagttattagtgtccaagtatagcttaggaaggtaatgggaaagagagacacgccggcgaggtcctcctaagttaggaccttggaccgtccctcctccatcctcacggctataccaactttatcctcgccccctccccaccacccctctctcccctcccctctcaaacaccaccgccaccgccatggtcacgcccttcccctcctcctagcaccacctctccccttcccgcgctacgcgggacgaggaccaggg

SEQ ID NO: 6593 - DNA, 1759 bp, Oryza sativa
gctctccatgcttcacccaacatgtatagccctccatgaatcctcgttgtatcagatgaccgtgtacgtcctctccgctatcaaacatattctcattcttgcaatctgcacatggacaacacatgtaatcactgtttcttcttctccgatcctcctccgcggagttcataaaatttattacgcccttttcggaactccgtagaatgacgtttcaaatttttcgcatacatccaacttcgatcaattgctacaaaattaaaaaaacaaattacatgcacatcttataagatcagtattgtaaaagtaagacgtggtgaaattgctcaattaatgattaatattactcacttgaytgatccattttgatcacttttgggaattttcttgttttccttggaaaaaagacaaaaaaatcgccccctacagcctcccaccaaaatagtgaacagtgggatacagttacactagatggtgggggtatttatactgtgcaacaaatatctgtaacggccctaaaacaatcaaccgtgacgggcatacaagtaatctctatcgggccttaataaaagcccgtcaaaaaagagtgtcatctgtgacgggcattaaacttatctcaatcaggcctctagttggagcccgtcacagatgaccctcatctgtgccgggcttcttttagggcccgattgagatatggaaccctcatctcaatcgggcctcaactatggcccgtcacagataagtgtcatccgtgacgggctttagttttatgccgatataccatggctgtgtgaccatatctcaatcgggcgaaacttcggcccgattgagattacttccttgtgacggcccgcaaattccagtcttgttatgggccgtcacagatggaaggatctgtactagtgtgagtattggctgctaacaagcacatgttaggtgctaaatggacctatggggtattgggacttttttccttaaattattattaatgcaataaaaacatttgtattgtaatgtgttatagtcagactattttcttaaatcattaattcacgcaataaaaatatttgtattgtaatatgtgttttagtgagatcacgattgtgctgctgatttcgtctctttgatcgtgtgttaggagacgcattcatgagtgtgtaggtgtgacgttgcgtgtctagtgttgtgtgcgtgtgcatctaccatgtaatccaactcttcgatggtgtgttataggagacgcatttatgggtgtgggtatgactttgcgtatgtagtgttatgtgcgtgtgcatctgccatgtaatccaaaatatagccatgaaataaaattaaagtaaatgtgatacaaacgtggcatgtttgccctaactattatatcagtaatggttttactattcggaattaaaaattaaaagttgaggggacaaagttctaggaaatcccaaaccaagttttcagacagttttaacattagacatatactttttaggctaaacattggagatattttcacttaattttgaacaaaattttactaaattcgaattatttggtcagtgtcacttgctgccaggacccaacataaatccaaaatatattaaatccataaattcgagcgaaaatttcaaagccagtgacttccaccgtgctcggtcaactgtatctttgtcacgaggccatcccgctggtggtagctttgctgactataataatgtccatatactgttcaccttgaacccgatcgatcagtgaaaacgcc

SEQ ID NO: 6594 - DNA, 554 bp, Oryza sativa
ggawtggraacggggggggggcagatccgatcgctgggcgacgcccagtaggcccccctcgtctgatagcttaaaatgtttcgaaaatagcaaagctgttcatgttatcgaaaatttccgttttttaaaatttaaattgaggacacgggcacaaaaacgtcccacgcaaccaatcaccaatttcccgcgcgctgtcacgctcacacagttgagctcccgcgccgagtcccgccacccaaccgcggccctcccgctgtttcccgccaaatttggcacgccgccgctgttgcctctccctctccgtttctcttccatttcctctccatttttagcttcccccgatcgtctcgtctccacccatccttcctcccccgccgcgccttcgccaccaccgcacatcatcgctcgcttcccggcggaacgcgccccgttccgccgccgccgccgcaggagaagacgactacgacgacgacgagcggtgttgtgtgaagagaaggtgatcctgaccgccgccgtacgccgccattgccgccggggccgcggcaccgcccctg

SEQ ID NO: 6595 - DNA, 1083 bp, Oryza sativa
tttttcgatgctaaaataagtcggccaaagtctcacaaatttggagtaattaagctactccggccggtagtttcaaaggaggatagccagtccagtccagatgggcgtgcgcctaaccgggccggtaactaactggttaatgggcagctaccataccaccatccatctcttctagtattatttgtagtgcatgtttcttctgctatcctcctcctcctaggcctttaaatgaaaactgctctgctcgatcgacgatccatggatgcagagtagctgggggcaaagaaaaaaaaacatttaattcttgcaatcctagctagtaatatatattcgagtcgaattgtttgtttgtttgtttgttgctaggtttgtctgggggtttggttagttataaaaagagagctagcaattctccacatttctctcccggttcctccgctgcaaccgttctcttgcttcaattctcgattcgccatgcatgcaagagtctgctgaacgccgattgattaattgtcttgtagtatctaggaaagtaatccgctgctgtatcctcctcctatctggattctggagtgatccctgcccgctggctccatcccgccgctgccgacacacataattaaacagctactagttgatcgatattatttcttctcttctcttggggtcatccctctcaaatcaagctctactactctacatactctctatcgggtgccggcactgcaggtcccccagggtactaactatctctggttacttgttgttcgtcttttccttttgagatggatcacaggggcaacaaaatattgatagattgattgattggatatatggttacactagtaccaaataccaatatcaatagatcgctattacgttgccaggaataacgcagggtacttaattgttggctgtttgtttgttggttggttttagtattccttatcttaagggactcgttcctttgagacctatgcatctgcatctcttcctccctgtgaatctatggttgattaatctcatatatatataggtgagtgagtgagtgagtggagtgcggtggcagagagctagctaggc

SEQ ID NO: 6596 - DNA, 2000 bp, Oryza sativa
cttccccaaccactaaatggtgcattttttaaaaaatctatatgaaagttgatttaaaaatcatattaatacatttttcaagtttattttagctaatgctctattaatcatacgctaatgaatcactctattttacatgcggggaggtgaagttcccaaccttcaccttcgaacataacctaagtatagatacgattcaaatagaacttgtaatatttgagtaggactctatttctatttttttaatatgaaggaccttccaatcttccatgtatgatagtatgaggctttattccgtatatgacttgatatatggtgaataccgccgagtctaatacacaagtatgaggtctcacgtatccaggacacagatagtttctattctaatttcttcttatataaataaaaaaatagccttaatggaatgcaatttttaattgtggataatggattaccacgcacacattttcaacatcctaaatggcaaagaaaaacttactttattatttgtaaaataactttttacaacatttttcaacaatctaattatcatttcattcctttataacctcaagtaattgtcacaaacttatccatgagcacattcatacagccactatatattccctgtgatactgtgtttttctctcaactttcccaacctctcatctctcatttttcgtgtacatgcttcctaaactactaaaagatatatttttcacaaaataaattctataaaaaattactttaaaaattatattaattcatttttaaaggttttatagctaatacttaattaattatgcattaatcatttggttttgcgtcagaaggatacgtgttgccctctagaccaaacaactgtaccgggaagcatttccacacgcccccattactcgtcggaacttttgaccggcgctgaagaaaacatatcccgcaatcaatgatcataatcagcccctaaccccttcccttcctcccttctccctttcccctcccctgaacggcttgtacggaggaccggacagctgggcagccagacgcgcagggacgcggtcgacgactcgtcatcacaacacactccgcccgcgtccgcgaggacgcgcagggccgcamgggggcgcgcgcatccaagccgtgtactcctggtgtgtacgtgccggagcgagtacgsgaccgcccaatggaattcgcggccgctttgaagaagcttgatgcttcgcgytggcccgccccgtccccgtggttggttggtttggtttggttacttgctactactcctactacgactactattccctccctggtttgctcggacgaacgagtcgtggactcgcgggttgggtctgcgcgtctgaccgcgtggcgttgctcacacaggcgagcgaaagcgagagacacaggcgggtgggggggcgacagagagggagagggagagggagagggagagagagacgccgccggtttcttccgcctgctcccgctcgttcttcctcggggtgggtgggtgagccggtccacgaggcggcgtcggcgacggcggggcaacactgccgcagcacaggggtcaggagacggggccggcgttggcggaggagaagattgggcacaacgagactatagagcaagcgacgcctccttttctttttttctccgatccatcaggtgaactaggccatgcgtctgaacttgtctcccttcccccctcttcctccggctgcttcatcggctccttaccttgttggtgacctagaaccgcgtgtagattggcaagattatttttggttttttgtaattttttttgcatgtgttttctcgtgattttaggggaagcttctcccatctcgttgactattgagaacggatattcgaatggagtgagggttttgtatggctaatcgtgagctgagctgggtgatctggtcttcgtgacagttctgagcacgaactggggaactggcttcgcattgaggttccaagaaggtcaccggatttggcgc

SEQ ID NO: 6597 - DNA, 2000 bp, Oryza sativa
actcgggagtggttggtggaatggtgggggcacgtgggtattctgcgttgctgtggtaccatcgtttttgctaaatttcgattgaacttttcataatcggttttacgattttaaatttaaaatccttacaagcatctaaaatttcagtcgggatctgtttttttcctgtgttgatcgaaacaatcgttaacctggtctcgtccgggccggtatgctgatttgttccacgtctctaacgaggcaaatcacatcagattttgcccacgatttagagactattgatggcaactgctacatcatccgttctaaaacaagtttattttttactcatcctgcaacataccaatacaaacttttaaaaaaataccttcactttatcaaatcttaatgtaattattccctatttttatctatttttaacacattcatcccgtattttcataaactctgatacgataattacttaaaaataaacttattttgggacaaacgtgaggaaataaaaaataaacttattctagatgaagagaacattactactcactccgtttcaggttataagactttctagcattgcccacatttaaatagatattaatgaatcagacatatatgtatgtatagattcattaatatttatatgaatatgaacaatgctaaaaagttttataatatgaaacggaggaagtagtaactagtgagagcatggttgtttcttatcccctctttwattttttgggttaattggatccatgtcataacaaatttgcaactcttaaaaaatatcattaccattcacctatttggtcccatgacattacaactttacatctatttgagatataccactacttaccactacttactacttaccctcttcctctcccctgtctactcattccggcagtggtgcatggcgaggtctgggtcggcggttcccctctcttcctctccatcccctctcacttcgggcagagtaaaatcggcgacctcgataccgccattgacatcctacgtttgtgttcctcgtcactccactatcgaatccacctccatcattgacaagcacgctggccatgcctaggtggctcgccaacctacacttgcttgacgacgacagagtctctaagtggcgcctgaattcaagatgaggttccgttcggcttgaggggaacaataaggtggccaaacgaggttgacctcgaattattccctttccctgatacacacgctagaggaggagatgggttggtagaggggagggaacgcgcgacggtggcgaggggatagggagagatggccgccggagargtggaggtggatcggtgaccatcgtggttaggctcatttcattgaaaatgagtgagtggagaggggaagggagaagggtaagctgatcaaaatttttaatgaatccaccagatagatatataaaatwggtaatatttcaaaaataattgtaaaattcaaataggaatagtaaatwacaatgatatattttaaaataggtaagtttataaggggaaatatgtagtggaaacttaaaaawtccatacagttggatcgaaaaatggacgtccgacatttatccacgtcatcacgatttactcatgrgtacttatgatgatgtgaacaaatctcgtacattttattttttattgtaattttaagtttccacgtatttttcccagtttataatggcaccgtctccctctccccatcgaggaagagtaaacccaaaaacccatctcgctagccgccgccggccacaaccattcctcacgacgggaggaagacgaaaaaaaaaaaawtcccactccgtgttggtaaaatccgactaccaattcggcctgtctcaatccaagaattcaagaatcgaactcctttggggtcgcytcgctgaatcttccytatatatacgcgctytcccattcgcgtgtgctccaaatcgtagtggggggaagtggagttgacgagctgtggaaaaaaagcctatcgca

SEQ ID NO: 6598 - DNA, 2000 bp, Oryza sativa
taatatacacaaaaagatgtaaagtttagcacagcgtgcagagaagagcatcttccaaactccaaggaaataccaataagacaattctcacagtgcaggaaacttgaggataaaaagctaggcaatctaaaactagaatgtagcaataaggatcatctgtttaagtacatatatacacgatttctttaccagcaatccacttgagaagccacatggcgattattgttagtagaacgaacaatttgacagctgcaggtaatctagctacacggattacgcatgccatgtaacgaatgtcgaacgtcgcagtgtctgccatagtgtacttgatgcctgcactagacgctggttcttctcggaaatgtctacaaagaccatgcaaaacgaatttaagacgatcgaggtcactagtgggatcaatgcaagaaaatcaatgaaaccacaggatatatcgcaagctcaccgaaatgtctctgccctgcactccttgaaagagtacgcagcatcaatcgtgtaaggaaaccgaacagcgaatccacctctcattattttgacgacatcctcgcagcttggattctcttctagcactcttgtgtcgttgccgtgcaaaggagtaatggccaggtgcccacacgaaggctcaagattatcaatataacaagagtatatgctgccaattagcacgtaaacgaaggaacggctggtattattcaggcaagcgacaggcctgtacttctcattgttgtttatttcctgcgaacaattcacaaaggctgaccacctacttgaagcaggctccagctcgatatggatggtgtggcaaccagtattcagggttgtagttggataaggtggaacaatcctctgaggaagtgtgttaggtgaatccgagatgttggcatcgacaacccagaaggtagaatcactgtagttgatgcccgtcacagagtacgttccctcgtagatctgaatcgtagccttgtcatcggtgcaagtcagctcgtaggatgtaaaaccgcatccagatgggtcacctcgccggcggaaaggagacgacacgttgctaagacggccgcaggtgaacggaaggcagtcatgccgatgatgctgatgccgcccacctgcatctgggacgacaactgcaagcacaaacaatacagagatgactcgcagggcggttgagcgatggaacgaaccaggaataatgatcgccatgctggaggcagaaggagatgaatgagagtggctagagatgaacttattttaagacgacatgagagaggctagagatgaacttatttggacagagtgaggtaggagtaatactaaagcaatatattcactgtgggctcctcgatagttaaccgtcgatgaacaactttcttgtaaacttttttctctccatcttaattatattggatgacctccttcagtcatcccgacaaaatattcaccgtgggcctacacgactgtgatgctgttgacttggaggcacttattaacgtagacaggttacatccagaccatcaccagtcactcagctaccccaggcaagccttatcgactatcgtataacagagcaatttgtatggatacatcatacatatggtactctaccaagttagcttcacgagttgattccagttacaacaaaagagagttccaatgacaacaaaagataaatgagtttcatgtagttacacgtctactggtttattggatatgcagtacacgtctactggtttacatgtagttacacgtctagcagaaatatatacacgttgtagaatctacgaacggtctccgaaggtcacatactcacatacctttctaagcaatacaacacggcagaagtttcagtggcagttggaattcctgctcacagacgcagcaatcgtgacaaacacaggataaatcctcactggagatcatagcaataggtgatcctttttctatagccacggccttctcttcatctgccttcctcgccattacactcc

SEQ ID NO: 6599 - DNA, 2000 bp, Oryza sativa
atcggcacaaargagaagatgtgagaagaactgtgcaaattggctccatggaggtagaaatcgtttattaaaaatttctgaatttgcttcggcataatcaggtgtgmattagcaatttaatattttatatgttaattaaaccaagtgtcattagcggcctaattatcggcttaattaccctgggcctatacgggttgaataggcccaacaaaggatggctgcaagcatatatatatatatatatagtcatgttacagcctgaagggagattggggggttgattttgttatcgtcgaaggctgctgctgmcgagaccaaggagatggcgatcccatcttccactatctgatgaatgccacctgttgttagggttggaagctaagcaaggtcaggtgatcgtttctggttttgctgctggattctcaagtgaatcctattcttactgtttgtgctgaaagttctcgggtaggagaattcatctagggttcgtttctgctattgtaaaccgaatccatctatattgtgatactatttgtttgctcctgagatatttaccggtctactatattttgggtgaattgctttgttgattcaatcaattggctgcggcgcatgcacacatatatgcagccttatttggagctattatatatatttggtcgattgagacaaacaaatagatactacatattttgtaccgtgaaagagaggggaaattagggtactcgctgtcgggtgctcatcagtggcacaggctgctagtgctaccacttccgttgacgggctcccgccgccgagttggtcaagagagagagagagaggaggggagtaaggtgataggggcaatttggtccaaaagggaattttaatgtattgaaagggtaaataggatgggagagagagagagagaggaggggagtaaagtgataagttgggatgaaaacggtacaaaatattttcagattccaggcttattttcgaaaacggaatcagccagtcagaaatacaatagtccataatacctccctagcctagcccaattcagcataatacctcccgtagtccataatacctcccctaacctagaggcttagagagtagagagtgaaggactgagagggagagtgaaggactgagagggacatcgaagattccagagctgagcggcggagcgacgcatccagatctcacgtcgcctcgtccccctccgtctgtttgaagtttttgtccatcgaagtttgaagctcagtttgagggtttcttgtattccgataaattttcgttatcgtatccgtgccggttcgttttcactccgttttcggtttcgataatattcaattccgttttcatatccggtgtttccgattctaattctgaaaaaaatatgaaaacgaaaacgataaaggtagtttccgttcgttttcataccgttttcatccctagtgataagggacaatttggtccaaaagagaatgacaatataccgaaagggtaagtagttacatatttccgatttcaaacaaatttataacgacatccttttaattagatggattgtaatggtattttttcaaaaccgttaatttatagagatatggattcaattaacccaatcaaataactctaattaacaaatgctaacataaataataattgtgttaattagccaaattaaacctttacaatttatgaaagtttctatcaagttattttaggcaaattaaaatgaatatgaaaatttaaactcttaaaaaaggtcctgaaaagtagatttaatcttttcaagcagagaaccgaattagagtagaaatcaaaattgaagtagggaaagaaacgaattggaaggaaaactcgtggaatcggaaaagcaggcggccactgtttataatatcctttcccttcctgcaagcaacttcgtccccgttaatcccagagggccgaccctcccgatttgtccccaaacccgagcacgccaccgagccctaaccctagcctccgcg

SEQ ID NO: 6600 - DNA, 667 bp, Oryza sativa
ggmccctacggttcgggaaagstgactkgcccccggacctaattggatcacytggtaccattgcttcaactcattctgttagtattgaatccctcgatgattccatttctgatgccaaaagcaataaggtactccaattattgacttgccagagacaattgttttctgtaacactgcatatgctctttgctgtgcatttacacttatagatatacacttgctcctgttggtatgtgcttttccattttgtcttctgacatttcacggtttgggttaatttttgtttctatgttatctcaaagctcgcttactgggtaggtgaaaagaaaagctttttgggtggttgttctggtgtgttgatgttgtgtactttgaaaatctggattgaatggcataacaaaattgggacttcagggtgctatgagctttctacgtttcagtagtggttcatctataggaatgaagcgaagaactattgactaaaaataaatttacttttgttgactactttgatgggtataggagatgagtagttattttattgaataataaagagatggaagatttgacatatttaaccttcatccgaaaaggagttcacttttgtacatgaatctggataagtgcatgtccagattcgtgttggcaaaaaacaactccttttggc

SEQ ID NO: 6601 - DNA, 2000 bp, Oryza sativa
ttgcagtacaatcaccttgaatttatatatggagaaatggaagaacgacgacgtgcagttttcagagtcagaaatgtgtgcagattgcaacaaattaaggtagagtggttcagactgagcatgagtgataagaaccaggcaactaagatttaacataataatataagcagcccatacagttgccagaatgggaccttttaatttgttctatcggaattccactaaaactaaacaagaagtatatgcattaattaatttattcttaacctgaaaatgcacgtggtgacatttaaaacggaaaaaaaaaacttgctaactgaattaaagtgtatggtcggcataactctgaaaagaacacatgcataacataacttccaagttcctatactgcttaagtgcttatgtcatatgtacatactactatcaaaagtaatctaacctagaatgaacaatccaaactctagaagagcaatattgcaaaagttttagttgacatataaagatttttaatatatacttccaactgaacctgtagattggaatgttagagtatcagccccattgtatctgcaaacaaataataatttttgaataaaacttttatatatgtgttcttaaggatctaaaaccaaaggctgaaaaataaacttcgatgaaaaaaccccaaaatcaactctaaatttaaggttgaaaattcaaattttggctgataagcataagcataagcgaaaagatgaggccatatatatggaagttggagatatattacgatatgattgatttgcgtggactcattccttataccttactgtgtaactcctatatatataccgccaccggccatcttagactcaatacaacgtgtgtatctctctccctctactattcaacatggaatacacaagtaaaccgacggcacaaatacttggtacattcgcacacatataatatctgcataaaatacagttataagttacctaccaataagaagagatgtgcatgttgaaaatttgcagcctacaactggcattttggggggttcatcacctgcctaactcacataaaggctccctatagcatgagaaggacaagctcacatgagctcaaccagataattcgtgggccccacactcctctcacaatccctaccatctctttccctctcctcccccactcctcctatccctctctctcatctcttcaccctttaaaaagcaagctagtgtattgtgcccacccttgccctcctaggctacacctcaccctccctctctgatacacatgcatacatacacaaagatacataaatacatatatacatatacatgtgtactatacctacaacaacacacatctgctccacactagtatatagctactaggtaagtagctaggccaattacctttggttgcaagccaaaagtaagtatccatcctcatccttttcctcctcccaccaagaaccttcatagtaccaccaccaccaccactcatcacatctcacactcattgcctctttcttcttcctccccatctagctctagcccctctcttgttcaaacaccttcatctgaatctcttgagcctgaattttcccaacacaagcaagcactacaattgagctaagctatagcacacacacacacacacaaaccctgaattcccacttcctaagttcctatagctaagcatatagtagccacaaggagctagctaattcttattagctatagctccagatccctcacaattctaaatttccaatcccaaaagacccaattaaacaagagatagttgcctcctaatccatataataagccctcaaattaactagtagccatatactatcaatagtaacaaggcagcacaagcagcataccataagcatacatcgggtcaaagccgaggtcaagtycaccggcaggaggacaagccggcggccggagcccagaggaggagctgaggcatcatcgatcgatcgatcggcatagtgcacgtac

SEQ ID NO: 6602 - DNA, 2000 bp, Oryza sativa
ttccaacaagtctgaactctgaactttacgatgaaacacttcttcctacttgtgtctttctgaatctttatttaggagcgacctgcttggaccggacgacaaccacgcaaagatcgatgtaagcagcattgccaatatggacaaccgtgagatcattgagttgcagaggaacgttattaaaggtaagagaggatataccttttttcttcccttctcgtctggcgtcagcacgtacgtgtgctgctccatgtaatgtacaggtgttcagtgactgaacttctctgaattatgatgcagagcaagacgacgaattggacaagctggaggagacgatagtcagcaccaagcacattgcgctggcgatcaacgaagagttggatctgcacactaggttgattgtaagtatctcagtagctcctatttgtaagcatcgtttctgaattaacttggttcctatactaatgccttttacaaacgttgcaggatgacttagacgagaaaacagaagagacaagcaaccagcttcaggtgatccaccgtgcctgttgtttgattctacagatgcccgcatatatttatctcatctttctaagataagctagctaacatgtcgtttcgtgtttgtatgtacagcgtgcgcagaaaaagttgaaatctgtaacaacacgcatgaggaaaagcgcttcctgctcatgccttctcctgtcggttattgcagttgtaattcttgtagctctattatgggctctcatcatgtactagtaatagtgtcacaaagacatcaaaagaaggcatcaacgcgttatgaatacgcagaagatacataacagtgctctagtctgaatccaaccaaacaggtctgcattcttcagaaaagggggtgaaatgatcttgtaagttgtaagttggtggactattgtcaccatcactcacatgcattttacaatcttggccacatccacatgtgcagtactttacaaaacctataggatgccctatccctgcaggacgatctcatttgtgttcctattttacaggtcaaagaaacgtacgccccagtgccccactagcataaaaactatcacacttgtgctgcccttcaccgatccctgccctatgacatgccctgcaaagggcaaaactacctcgatcagcaccatttgcacgcttaaccacatgatggctgccatttttatatccaagcctctagaactccatgcacgttcggttctgtccctagcacatgagacaactagccggatgccttgaccgatcttgaagcaactgcagtttttaatcctcgcaggcactgtcccagtttaaaatccctcatccgagtaatctcctatcccttggtaacaatgacaaattaatttacaacgccactcgtttagtggttcagtggtcactactacaatggcaccaaacaacagatggtcaatcgcaagtcgcagccagggttaaacctatcagtttagccgatttgatcggtgctcaccgaaataccgaaatttctgaaattttgagcaaaatttagttgaatttgaataaatattaccaaaattcatggaaaaattaaaaaatttcggccgaaataatatcgtatcggaggggtctgaaatgaccgaaatttccaaccctggtcgcagcagctgttttaccggctagttttttgcacacatcgcaccaaatatcccaaagccctgcctgcctgaaaatcttggccatgtttctagctacaggccttcacatggctgcctgaaagcttgtctgcgcatgcctgtcagtgtcagtgaatattactagtagtagaagcagttgataagaacatgtagactggttagtccactgcagtgaccaatgttcatttactagttattggggttcttcttcagatcatttgctagcctcctagctataaatttgtccacattgttcagatctttgacgcattattcagctgcctatagtagtagctagctaggtgagatcgaggggca

SEQ ID NO: 6603 - DNA, 2000 bp, Oryza sativa
ttaccagtgtgcccagaaagcccctgaccagttgcatgtcgttggaaatggtgatgtattctcttttactgactggaacaaacatgtttcaggctgctctaaaatatcgacaagcatgattgctcgaggtgcactcataaaggttagtttggtgctgcagtatatgtactttaacatctatcatgagaaaaatgctataattgctagctgtaatgtcaggcttttgttccctcaagttcatgtctgctaattttggtgctaatgcatgggttttttttttcacctgacagccttggatatttactgaggttaaagaacaaaggcactgggatattacatctggcgagagattcaatattcttaaagattttgtgagttttggtctggaacactggggttccgattccaaaggtaggttctctctattgccagatattggctcagattatgagttttgtgaggcctggaatgcgataatatctgctcatcatcgagttacagttttttttttcttgctgcactgaaatgctcggcatgaaatcaaattgattttgaaagggttgtcttgatcatcaaattatcatgtgtattttcaggtgttgaaacaacacgctattttttactagaatggctaagctacacctgccgctacataccggttggcctgttggatgtgatcccgcaacgtttgaactggaggcccccaagctactgtggccgtgatgatcttgaaaccctaatgatctctgattcagcagctgactgggtaagctgtcctcgttctgagtgttggatggtttctatcttttactagctatcacaagctgataatatatatcttgtctaatgtacgtacagatcaggatctcagagatgttgcttggcaaagttccagaagggtttacgtttacacccaagcacaaatccaatgcttatgatcgagctgaaaacggctaacaccattcatctctcttcaaagcttgtgcccagccttggagctccatgctgcctgataatgtttacttgaaccggcggtgtaggggagcagcatgattttgcttcacccaaacgacacaattcatgtttatttaaacatagagagctgctactagtaatatgtgatgagggaattaccgtgacaagggattatgactcccttggaccgccaaaagaaaaaatccgcttcatttctgaaggaatttttatttcggtgaaaattctgttccctctatccccaatgaggactttcgtatgcacgcgaagttttctaaatagtttctgctgttatgttgggctggtttggttcgaggcctaaattagacttaccaatatttagcaattttaatagtgtttagtatctatttgctttgaagccaaattttggcatgcctaaaaaaataggccatttcaatagtgaacttaggctattttggctttaatccaaacataactttgcattaccaaaattagtcatgccaaaaattactaaaatttggcaatgacctatttaggccacaaaccaaaccaactcgttatattgcctcagtgttgtgccatcgtgctgatcttgtcgaaactaggctttttwattttttgaacctttttgattttaaaaaataatattttcaaaaattatttctaaaatctgaactgtcagcctgcttggcgtgacaacaatactgacacgccacctgtagcggccgtgtacatttttagagtacatttgattccaagcattgcacttcctatctttaaccagatttgttactcaaaaaaaaaaaaacttgttccgatcgtaaatatatattttaatgttaaggaatataattcagtcatacagtacctatattctgctgttttgctaattgggcctccatttgccgccgccgtgcagcccaggcccagccgctctgccgccttaataaattaagcagaggaggagtggaggaccaagtgatcgaagcggtagccgccgagtgagagtgacgcgtcgcgacgcc

SEQ ID NO: 6604 - DNA, 2000 bp, Oryza sativa
tggtgtttgaatcttctgaagatgaagataaagattaagtgtttcacgcaaaacgaagtggtaataacgtgtgactaattgagttttaattattacaaacttgaaaaatagattaatctgatattttagaacaactttcatatagaaagttttcgcacgaaacgcaccgtttaacagtttgaaaagcataccactataatccaaaatttaatccacacttttaaatggattcgaacggggccatagtactgtcacttttcttatttaagatatagaatttacatcggttttcattaacaagctttaatttcacctctgaatccaaaattctccaaattatctccactctccagcctcacacaaccatatgtgcagttcaaccaacttgcttctccatctctctatatcggagtgtacaactgtacatatctgtgtatagggattaattgtcactgttggtgtaatacagtttaaaaactaaaggtttgatctacaaaccttgtgcatcttaaattatttattttacttttgagcaaactgccttggtctctgcagctctatgaaagatgaagcataggaatttggcaagaatagcatatatcatgttcatgatctcttctagcacatacttataattatttctgaactatcgatatcttcatatttggaacctcaaattaactgtttgtcacatcatgccctcattgtagccaactgcatgtactgttccttttgcgccgaaacaagatgatagaagcacaatttgttagtaaactactaataccatccatcttatattctctttaaagctcaaaatgcatcggataactgttagtccagtgaaacatatctccattatctaacttattgttctatttctactggaccatatattccagcaacatttgacaaaattaatggcatatgtctttgttatgtggtgcttcagattcatatagcttgatatatagccttctggtaatttacataggcgctaatctttagttgtaaactagagcatatcatagtgttgacaccgttaacacttaacacatagataccaatctaagtgtaaaatattaatcttagaacatacgtagtagatactaaactttaggtgtaaattagcacttggcaaactggttttcccaaaggagcaatcaaagcggtgtgacatataaactgattagtaaccggtggtgtgacaagcaaagatgtttcagcaataataacatagctaaagcatgtatacccttgcagtactttttgggcaaaagaagccagttctattactgaagtacactcttcgatttaactgttctattactgaggtactcttcgattttgtggttgactgtaacggtaatgctaatacttgacataattaggtagagctctgaggagctacatgagatgtcaatactttgctcttatgcccaccatttcaccatttggatctcatgttcacagtttcatctagggacatccaggttgattcttctatagttatattgacaatattgcgcagtgaaccactgcaggatattaaaaacatcgttcattgactatgggcgccgcgggaggaagacggcgccaagccgagcatcgcaggaggaagacagcgcggcggcggcgccgagaagacgaggatgtctaggcggtggctggtgtggtgattgagtggactgaggggatggagggatgagcgatgaccgtgtggacggctggatggaatcaccagttggacatctgacggcgcatgcatggcgagggactgtagtactgtagcagcatttctctggcctaagatgaatcgcaacactgttggtagtgggtcacgaaaactaaagatttgatatgataagaacaagcagcccttctcaaaaaaaaaaggaaaaggaaaaggaaaaggaagggaaagraaaaaaaagaaagaagaaggagcaagcctcgcctacttaagcacaacagcagccttgctccagctgcgagctagagcc

SEQ ID NO: 6605 - DNA, 2000 bp, Oryza sativa
gctagggcacacgagcacgaggctacgctgtccacagcgtgcgcgaccctcgtcttctcctcgctgcgcgtcctcgttttggcgaggttctgcgtcgctcacataggaagcgagaaacctagcaaagcgcggtcgcccgcttcacatcggtgaaaatctgagctggcgcaacgagggaaggacttataggcgtttttcattttcctgacttcaaggcagtgtcatgtttgttggccgctgtacgtgaccagtcttaacgacaacagtagttttttccgtctgtattttcggcgagcagttctggtggattatcaatgggttccggatggagtagagtaaggccgagtttaggccttgtttagttcccaatctattaacttattaaaagaatagaaaaagtaacatccacgttcgctctcacggcttagaaattcttatattaattggagaaaaagaaaaacagagtccatatagaaatacaatttagaaatagttgaaattcggaattaaaaaataaggaatattagaagaggagactagagtctatatagaaatacaattaagaaataatagatattcagaattaaacataagaaatattagaaatagagtatagagtctatataggaatttaaaactaactaaaattcagaataaacataaaattaaaagtaaagtttaaagtttgtataaaaatatagtttacagataactaaaattcgaaattaaaaaaacatgggaagaagaaactaaagtcagtataggaatacaatttaaaagtaactgatattcgaaattaaaaattaaagaatattgaaagataagtttagagtccacatagaaatacaattataaataataaaaaattcagattaaaaaataaataatattgtaagaagagcctagagtctatatagaaatacaatttacagataacgaaaattcggaattagaaaaagaaatattgaaagacgagactagagtccatatagaaatataatttacaaataactaaaatttgatattaaaaataattaacaactaatacatttataaaatacaacatgaatattacatattagtagtttcgtaaagttagtataaaatttaaaattatgttgtcattttaatatatttgaataatacattgaaaaaacatatatgctattatataagagaaaatataatgatgctggccgtgcaatctgcgcgggccaccatgctcgttttttcttaaaattttcaacttttttatcacattgttccaattttaataaaactttaaattttagcgtgaactaaacacatagttccaaaaattttcttcaaacttctaacttttccatcacatcaaggccgtgtttagttataaaatttttcttcaaacttccaacttttccatcacatcaaaactttcctacacataaacttcaaacttttccgtcacaatttcaaccaaaattccaattttagcgtgaacctaaggctgtatttgatggtggaaaagttttaaaattggaagaaagttggtagttttgtgtgtagaaaagttttatatgtgatgtgatgtgatggaaagttgggaatttgggggaactaaacacggcttaaacacacctcaaaacttttctacacacataaacttctaatttttccaacatatcgttttaatttcaattaaacttataattttggcgtgacaccttaaaatacctgtagccaaaaatgggggttgtgggggttttcccggaaatgggggttgtgtcctttcagtctgtgtctcgtcatcgcggcggtataaatcctgtctccactcaccggtcaccactcaccactggaccactaccactggaccacgggggttggagtagtgactcgtgacgcagcaaccgttcgtcgcgcctctatttacgtgttcgttcgtcgtcgctcccatctccactcgtctcgacgcatccgagattctatacctgctcgagtgctcgatccgtcacggactg

SEQ ID NO: 6606 - DNA, 16 bp, Oryza sativa
akcttcsaraagggaa

SEQ ID NO: 6607 - DNA, 2000 bp, Oryza sativa
tattgctcaatcttttgatgaacttttttttataggataggttattagtcatgatcacgttccctttccattttggatattaaaatgccataatatgtcctactttctctttctttaggcccatttctttttctcaactttaaacttcatctttctcattttccgttaacacgtttttcaaacagttaaattgtgtattttttttacaaaaagtttctcattttccgttaacacgtttttcaaagttaaattgtgtatttttttacaaaaagtttctatgcagaagttgtttaaaaaaatcaaataaatctattttttaattttataatagttaatcatgtgctaatgagttttcttctttttgagtggcaggacaggtttggtcagttaaatggtgccatgttcttttaagccactttaccgtattattctctattttttagttagtttatcggattattatcagaaattatttgttctgcacctttaaaaccatattctctgataaaaaaattcttcacgttactgcaccgataatttattttaagttatttattgctactatttataagtttatttttgaaatatttaatttattcctataattaatgaagtagtagtcacgactggctttgtccggaaacaatgactgaaagcgttttgatttatcgctgataagtcgtcattgcatatgttactgcgcatcatatcatcaacagtgaatgctgcttaattcaaagtttcttgggtcagagttgcagaacttctgaacttttgagtgtcaccatctccggaaaaaatctgctaggagtaatccttcactgttaaatgtgtaagagcttatgtaatcataaaaccattggataatgtcaaatgtcatgatccagcgcagcacgagccgaataagagccttatcttttcacttatgcttatacttatcagccaaaatttaaattttcagttttaaatttagactgattttaaggttttttcatcgatgtttatttttcagtctttgcttttggaccattaaaaacacgcgtataaaaattttattcccaaattacttttcttttaaaatatgttgttttgcttattccgtaagctagccaacgtacggctcatgatcagcagccggcggctaaggacagcagcaagtagggctagttgcaaagaaaatagatgagatattgaccgcgtcggtgatgactgtttttctccgattgattacggagatactcccttcgtttttaaacatgtctttttttaaaaaaaattaagtaattattaattctttttctatcatttaattcattgttaaatatacttttatgtgtatatatagttttacatatttctctaaagtttttgaatatgacgaatggttaaagacatgctaaaaagtcaacggtgtcaaatatttagaaattgagggagtatattttactgtatcaagctcatgactaacactattaggtactacttcctcggtttcatattataagtcatttaacctttttctagtcaaactttattaggtttaaccgaatttgtagaataatttgtcaatatctcaaatatcaaatcattttaattaaatataacattgaatatatttttaataatatgtttgttttgtgttgaaaatactactagatttttctataaacttggacaaacatatttagttaagaaaaaaattaaacgacttattatatataaaacggagggagtattctactgtatcaagctcctgactaacactagttgtagtggtacaaaaccgggagaataaaatggccattgcttggtcttgatttgttcacatggcacagtagctcgagatacaatcgtattgtctgacgtcgccattgtgtagattagcttctttggatgtctatttaatccggtttcacgcccagattcctgaatccaaaaccaattagtagtatcgattactgaggaagaagagcttagcaaggagtggtcgatcgtcatca

SEQ ID NO: 6608 - DNA, 1605 bp, Oryza sativa
cgcccatttatgaagggatgacagggtgatccccgaggtcagacgaacgaggacgcgtggccacactcaaaaacaggtagtgtttcagcttccaagagaaggcaagccaagttttactatagattaggatgggcccccacccaaaaagagagagggagaagtggtgcatgtggtatccccttgagatataaaaggaggaccttgcccacttaagaggagaggctggaaggggggatgatctggagaggagatcccacgagaaaaaaaaaaaaggaaaaaagggtttttaraataagagccctctggctctccagctcttggtagcttcttcatacmcagatcccccagaacccrggaccagggttttacgcttytcagcggcccgaacctgtatacatcgcccgtgtcttgtgctttttccattttcgcraattttccamagactaggagcttaaaatttcacccagggcccccggctgaaccgacaaaggggggcctgcccggtttcccggttaggagccccargctccgttacacatatttcgtcatttaagtttttcctttctatggttggttcttatatgtttctaaatgtgaaaaaaaaattgttggacatctcttccctctacactatagaggagaagagaggaaaaatgatgggggatggkgggcgccacccgccctcccccaccactttagcaccgtcccaccacgtcggcaggaggacggcgctagagtggctggcgctgtccagttggatcacggcgccagccattctgacgccaaaaaggaccattttaagtttttttaggtctatttacgaaataagttttttaaaaggactaaattatgaaaaatccaggcacgcctgcactgtgtctccgtgcaaggcagcgcgcgcggcagaaagcgggcgaaacccgcggaaatattcgcggctcggcttcgcgctgcgctgctgggcgtctgggcggggcacggcgaaatgttgcatacgccgcgcgcgcgcgcgcaagccgcgagacaaggcgcgagcggcgggcgaccgaatgcccccactgcccacactttccttgcttacggcaggcgaaccttgtgcgcgcgcacgcacgcacagctgcacaccgacacttgttgctgctggcccctctccacggctccacccgccagcctgtgccgccgctgcacgctgcccccaccaaccacggactctgcgtcgtcttctcctctccttcctcgtctcgcggtctcgcctcggcctcgcatccactattccacttcgacaacccttctcactctctctctcttcacttataagcaagctcacacacacctcacctctctctctctctctctctctctctctcttccgttggagtaaaaaaggaggggaaagtgagaaaaagaggagaaaagctcacaccacccacctcctccattactagtttacttctcttctcctcctttctcccccattcccccaattcattccttcgccgaaccaccagagtggtggagagtagctagcagagtagcagagcggtgggagcagcagcagccgtagccgcatccggagagattcgggcaggagaagccgccgcagcg

SEQ ID NO: 6609 - DNA, 740 bp, Oryza sativa
aatcatttgctccttccttaaccacctctcctactcgtggatttctttttgttcctttctttctcctctcctctcttcgtaccccctgtcacgtagttcttgtttactctttccattaggtgtcacaggtttcttctcctcttatccttcctttccatcggttcttgtacttggtggtatacccctagctgctcgcctttgtgttaatttggttggattgggagtttcttgttctctctttagccttgagcgatcttggtttcttgcaattagcctttgactgcttcttcttcttccacttgccgccggcagctagaagtggtccatcgtaccaaccctttcgtcctcattgaaccattccgcctcgctcccagctccattactagaagcactagagctagcgtgaatgcgtgatccttgatgcgtagttagcagctagctcctgcccccaatctgccatctccgcattgcgattttgagtttttgagattgtaatttgcgaacgatctcggttgtgctgagagcttagcgttgacttcgatgggtgcatcgcgttcgatcgccgattctgatttggtcgcgtgatccgggggtgatcggtgattactccgagcgggaggggagatcgtctcttggcgcggttgcgcttcgccgcgcggagggagagacattcgcggcgtaatccgaaggtgtttgttggatcgaggcgtggtgtccgagaaagattcggagcggcggca

SEQ ID NO: 6610 - DNA, 2000 bp, Oryza sativa
atagcatttctatacataaattttttcaactttgtttttttttaaaaaattatggtgaactgtagtaggaagagaagaaggggaggaggaagggggagaggaagagcgtataggggggagggacgggtgatcgctaggaaggagagggaagcgatcacccgcccactagcaatacccctatattgttccattctcataagcttgcttctaaaaattattttttttatgatgctggtgtttactgaaagatgtatgctgatgtttaatgaaacttagcacttgttttctattgattcctagggctacgtgtttgtagaatcagtctatccgacctatagatacacttttcatatcagtgatggcctttctagaggagctgggtgttgggccatggttgcgctagcgatcggcacgtgaggggagtatttgcccggatttctcgccctagtatccttatcgacgcattcatgatatctagattaattcaactgtccggaggcatggtagaagcacgcccaccccatgtgcgtatttcatgacatgctttggtcgcgggtttctttctcgttagaagaagttgtatccgtcccggacatgtgcaatgcagtgagatcttgaaatctcattagtaaaaaaaatattaaggttttatatatgaaaatggtattaatagagctgttgcatagtcgagtaaaatacttttatgtagctatattttgtgaaaatgatattaatagaacatatcataagttaagattatgagcaagcacgtgtaatgctactcctaattaatcaactaattaagttctccagctctgtaaaggcatccacaatgtgatgaaatagcaagtaataagcttattattaggtattagcggtttttggtgggttttatctatttttttaattgtgctatggttcatgtttggggaatttttgtgggtcccaccttattacccactctacatatgtacatttagggatatcaattttacctatgggaccgggtacccacgagtaccgcacgtaccacacgtaatgggtatgggtgtgggttagattttatgcccttgggtatggccgatccaaacccgatgtattaacaggtgtggcgtggggtttattctatgcacatgagtgtttcgtggatacccaaatatttatgttcatacataaactttagaagattgtgtgtcaacagtcaacactaactaaaacataaaacataaatatgtaagtgcaacaaagtcatatagtattaatggtttaatcatttgctttctttcttagtgacgaaataatttgtgattacagaatttatggattttgattcatatttaatggctatgctcggctggcgtttaccacggctgcactgcgactagctatagcagtgagcagccgtagcgctgccacatgaatggcttccgaacacgccaatactttatgaataattataacgtgtagtattgattgtttatggttttatagttaatggctaaacatagatgttaaaagtaatagtttatatgtatatgttgttggaaacctatggtatatgatacttgacgggcatggacatgggtttttattttacgcctgatgagagtagtgggaacgggcgggcgagtagttttgggtcttgggccaggtatgttcgatccgcccaaacctaacccgactcactgatgttcctatatacgtagtgatgtcttttcaacttattattatcatctgacggacaaacgttgctagcacctaattttgcaataaacattgagatgccctaaactggattaggcgtactggcatgtgggcgtagtcactgcatgtgggccagctctagagatttctggctcggtccaggatttcaccgcacttcgcacaggcgcaccgagcacaatacgcgaacgaagggaaaagaaaccagagcttacccaccaggcgctttgcggccagcgacgacgaggacggaggcgaggcgcgcgccgcggccggag

SEQ ID NO: 6611 - DNA, 2000 bp, Oryza sativa
cggcgagcgacatgttcggaacggagcagaatgaatagtgtgctacctaatgattacattattcgagtagcaccttaagatcttaaatttaaccgatttggctatatctcactcgaaagatttttttcttatctcactcgattttctcactcaaatttacagggtattttcttgtaaattacagtgtaacttatgaaacttacattgtaatttttgtaagttgcagtgtaattttttaatctttgcatgtaagttttaaaatttatattggatttggtctttttcttgaagatatggtaatttattgtccattatggtgtttcttagttgctttttatcttttactgtgtctattggattttaatccaaaaattaaaaatctgtgtgatatggtcataaaaatcttttgaaagatgcataggtactcccaatttaattcttcatccgagcgaattttaaggcttagttaaagaaaaaaaaacttactaataaaggcccaccaataaaaccacgcgcgatcggaataagttcacttcgtcacccttaactgtgatcgaaatctaatccatgaccctaaaccacaaaaccagatatatcgacccccaaacttatgggcgccggcaactagcaaggagaggatggcacggaggaaggcccgcccgccgccgtcgtcgccgcctccgctcgggcctccctggcgcccatcgctatcgcctctgctcgatcctcctctggcaccaccgccgctcgagtcgggtggccgccgccgttttgggatgccccgtygcccggcgtcgtcgcctctgctcgagccgagcggcctccgcccatgaggcgcgcggcgaggctaggtgtgcgcggcgtgttggcctcggagggtggcgcggacggcctgggccgcgcgagagcgccagaggccggctcgatctggacgccgatctggatgtcgccgcggaggaggttggcgtcgaggtcgaggctgttgcgtggcgcctggaggcctccgtcgtttgtgccgccccgtcgcccgacgccgtcacctccgctcgacctgcctctagcgccgccgccgctctagccgggtggccgccgccgtttggcctccccgttgcccggcgccatcgcccatcaccgcctgtgggagacgtaggggaagaaggggggagagagagaagggagaaagggaggaggaagaaggaaggaggatgacatgtggggtccacatgtcagtgggacccacaattttttttatgtgtgtgaatgacaaacgggtcccacaattgtaatgccatgtaagtgccacgtcaacgccacgtggatcgaagactcggtcaatattgccacgtaggcgccacgtaagcaaaaccgcctcccaaaaccgcgcagggagtcaaattgcaccggttttagaagtttgggggtcgagatatctggttttgtggtttagggtcatggattagatttcgaccacagttgagggtcatgaagtgaacttattcccgcgcgatcaaacgtgttaaggatccacgttgcggcccataaaggcccagatgtctctactatttcttcttctagtgagctccatcgaagcttttaggcgaggcctaccgctgtggctaagcggcggcgtgtgccagcccaacccccgacgacgacgacgcgtggcgacggccgccgcgacacccgccgccacgtcgccccgccacgcgccgccccccggcgagctcctcctcctcttttataatcccagcctcgtctcccccgcgatgaccacccccctcgccgcgccacgtacgccgcatcgcatgcgcgcgctttccctcgccagagcaagtagcccgccgcctcttcttcttcacctccgacgagcccttgcacccgcgtcgtcgtcttctccggcgccggtgctgttgctgcgtcctgcggtttcttgttcttctttgtttgttagcgacagggcggcggcggctcgccggagcagcggcagcagcaggagaagc

SEQ ID NO: 6612 - DNA, 94 bp, Oryza sativa
  misc_feature (1)...(94): n = A,T,C or G
cttttcaaacccggwtycaaaagttaaaakggttaagatcatcaagtkatkasccaagattcatcaatacnktaacattttaatagcgaagaaa

SEQ ID NO: 6613 - DNA, 1117 bp, Oryza sativa
acccggggaactcctyccctggttcccggccggccgcggcytcccggggaactccttccccggattcggccggccgcggcctcccggcgagctccttcccccgggttccgccggccgtgacctcccggcgacctcctcccccgcgtccacccggcggcgacctcctcccctgcgcccggccggccgtggcctcccggcgagctcctcccccacacccgccgccgctgctcgagccgattgaaggcatgagattgtgagagaggaggagatgaaagagcgaggggaagggtgataggtgagccccacatgggtcccacctaattttttactttgaatgccacttagatggcacctaagctaaaactgaactcaatactgtcttgggagtcgatttgcactggttttcggagatgagtgagtcgttatacctggtttttttggttgagggatgttattcgacgaaggacaagagatgagggaggtaaaatggacttattcaaaaagagaatgagtttacttttcattttgagttgaaatggcaaagttagctatatactactatgatctctcatttttcttccctccgtggacacgtgtagtctatccaccaagtacacagctcttctggactgataggccatgaaagctacagcaaactgttgcccgactatactactccgtagtatacatacttcagcacggtcacacggaagacgtggccggtgattcgtactctccatacatgtgcacccccttcgaagaaactgcctgcaaaaggtcgaaaaatttgcatcaattctcccgagattcgcaccacttccatcagccgacaacgtgtcatgttcacgagggcgactcgtggcagacgcgcttgccacgccggcctatgcagcagggaaaggccacaaaaagactctctcctgtacgactatgcatttctttatccaaagagatgaaaagtcggtgcgcgtcaatggcgcgtgcgccgtgcacctacccctattaatagctccccctctgcattgttgcgagctctagctcaccacagccacacttctgatcactgctcactcagctaattaagctcaagcttttgcttacggcaagtcttgcaacc

SEQ ID NO: 6614 - DNA, 2000 bp, Oryza sativa
agaattaatcttcgagtgggctaagacccattcattaattccaacatatacaacaataaactgtgaacaagcctgtcacttgcactctaaagtaggtactgccgatatgataattgataacccgacaactgtaagcttcacaattcttcgtcgagaacttctcgaaccaagaagccacccataacgaaatagaaaaagcaaaagactctagacaaatctaactccttaattgttatggaaagacaaaaccctatacaacaatctaaacttctaaagacttttttagaaaagccctttaaatacctaatgtaaaccaatgagaaacgggtcccctttctgctcacctctggtgaatacagtagagatagaggaggaggactgtacattgtaagggcttcgcgaaaagaacgagtggcttatttacactctagacttgtttggctaatgggatggtaaaatgatttcccacccaccaaaagacattttaaatcctaaccattcattctctctttcatttaatcataatccttcatctatttctcaatcccaatcccacccccattttccattatccaaacacacactctggagatgatgcataattttttttcttataatttaacatataaaatggactatgctcatttctttctaatatcaaatccaaataaaaaaaaatgtcttggttcataggttcatataagctgagcagcaaatatctatactttgggaatgttttctctaaagtttgacttttgtcatgtccagaagataaaactacaaagtcgaaatttccttaaaaaaatgccttctttctaatctccactccagataaaaaatatatattggtttgtagttcacatatgtaaaaacaatggagtattgtttatttggacaaataagttttgtacaatttgagaatttcacaaatgttgaaaataaggcgagatgaaaaatacaacctcaaaataaaaaaaaagacacaacaactagagaatagtactgtgttaacttttctgaaaaggctacgagtaaaaaaaatacttcttccatccacaaaagttagacatatttcacatttgagtttttccaaataagttgtttctatttgtagtctttatgcatttaagacttaaataaatagataaattaaatatttgattagaacccaaagagtcatctaataaatactcattggttgcatgcttatattcactccttaattttgtagcatctaagataatttaatttctccttagtcttggtgacaaaagtaatattggtaacttttatgtatagagtgagtgtttgcaaaactagatttataacttccatatagttagactgaatgaattagtgtcgtttctgtctttcatgtaagtataataataaaaaaggaatgtttttcctttcataattaattgcgtgggaaattatttatttagcaaatagagcaaaaggaacaatataatgaaggaaattaagaagagaaggggaaaaagaaattaagagttaaatatataatgaatagtttgtaggtgtggcaattaagcgtgagtttcggtccgccaaccgcgcgctcttggtcgaccacaacgcatgctactctcagcctcagccaaccaattctgcaaaatgcattgatcgatcgatgttctctcctccctagctgcggacggacttggatccatccatctcccattcattcattcattcattcatgtggccatccatccaccatcttgcatgctagctagctaccctgcaggcccataacgacattattcaattcgaattaattccatcatcatataataatatatatgatgctgagctcgtcggcgtcgaggcgggaggtcggcggcggcggcgccgcctccagcaccaagagcggcgagctgtccctgtccaaggtggccagcgtggccatacgggagtcgtcgggctcgggctcgggcgggatttccaagagcagcgaattgctgtcgagggcaggaacc

SEQ ID NO: 6615 - DNA, 2000 bp, Oryza sativa
ttaaaaatcgatctccatcaagatagcgatggggcgactagttttctaaatttttcaaataattttttaaatattttaataaataaaattaaaaaaaatcccattttacgtgggcagcatagtactgatggccttgttttgggctaatccattcggcccatggatttgttatgaatgactttgttccgttcccataaacaggaagagttcatgacggattagtccaaagcaaggccctcagtgctgctatgctgcttatgtccctatgactgatgaacaatgtccgatatggtgtaattcgatctcgatatacagcttcagaatgcacaataatctcgtcatgatccaatcaaagcttaaacaccttgtacccatgaatgatctgccttctagcttttatctgaccaccggtctctgacgattaagccatggattctagatcaaagttaaccagctacttggagaaacatagcaggcaatcttggcataaaacttgcatacatggaattgttccaacatagagatttgacaaggcattcccctagatacttacacagtgttctagtgcgcatattgacacgcaatatataacataaatatgcatttccttctgaacttcagattgtcatcgacgactgcgggaaagcacgagggagaccggccggccaccacaagctagctacagactaaatcaattaatttcatctgcacttactcgttgatgtcgatggctaatattaattcgaaatatctaatatatgaagtactccacttgacaagatcagagaaatgcatgcacgatgtcgctgttcttgtcactgtcagatagccacgaagaacttgtcgcgggcaagcaaacaagcatggctctcgtcagtcgtcactactccctatatttcgtattataaagagtcaagtaccataaataaattaaaaactacatattcaatatttaacatgatgtacggtaaaaatacatatttaaaacttaatttatcgcagaacgataaatttaaagtataataatatcacaaaactatgatttagtaacagatttatcataaaattatagatttagtgtcaatttaatcataaaacttggatatttataatcaaacataacattgatgtcaaatatttaaatcataacattagtgttaattatttaaaccataaatatgtagtatttttttgcgaggataaatatgtagtattgtgataattttattgttaaatatgtagttatacgatacatcaccttaaatctgtaattttatgataatttagtcaaagtatatgtagttttgtaaaatttattctattataaatcgtttgattttttttctcaatcaaaattatttagatttgtccaaatttatagaaaaaattagcaacatttataacaccaaattagtttcattgaatttaccatcgaatatattttgataatatatttgttttgcattgaaaacattactatttattttttttgtaagctttagtttgactaagaaaaaaaattcaagtgagatatagtataaaacgaaaggagtagccagcacggtatatacttgatctggtacgagtcattatggccagctcatatattatcttaaaacaaaacgaggcggcttgacattgtgtttgaacttacgtgcccaagatgaggccacagcactatctactcgatccaaacacaagaagttccatgcatgttaatcgatcagtcgtcattcgtcaagcttaatgatgacaggaaaatcaactatatattgggttatccaaacaaaatgtgcaagaaaccttactggttaaccgattgaagtgtctcattgacaagaggaagaagtcacgccatcttgcagtatataaggggggacattctttcctagctacgatcacgagctagcgagcgcgagcatcgaggcgccattcataattccatctccagatactgatcaagcagatcagagctcgagttatcatagctatttgatcaa

SEQ ID NO: 6616 - DNA, 2000 bp, Oryza sativa
ccaggctgcgtgatccggacgacggtggaggcgaccagagttcgattcggacgcacgtgagatcacgaggtttgcctcgcttttgtattcgactccggttatacttttgctttggaattgtgttcctttgctttcttcctcctccagcatctgctcatactatacattccgtgtgatggaacactgcgaatcaaatgggacatttgagatgttgttgtactggtagcctgatgaattcattgtctctttctgacaagccgcatatggagtctgttaggtgtttcaagtcgcggtttggtttcctctcactttctctgcttcaatctccagattccagcgggcagcggcctcgcagaaacagatatcaactcgattaatacaaaaatgattcggtcgtagttatttcgcacgcggaggaaatggaatcttttagaagaaaaattgcagaacggagtaatttcactcagatcaattccacgttttcctaatcggtgtcggtgctctactactactaggatgaaaacgggaatacggcaaaggatatttatcaaatacgaaaacggaacgaatacgatttggaacgaatacggtaacggatacttatcggaatataaaaagcccttaaattgaacttttcaaattaagaaagagatgtagctcaatatttttttctaaaataacaaaccgatatttatttttttttaccaataataataataataactagttgtaccctttactttcttggagaaaaagaactatattcatctataactataattataagtagtatgacatggtctaataaaaatttaaaaagtaatcatgcaaacaaatctaaattactggaactaaaaatatttctatttaattaagcacatcaatactagtataaacctaaacattaaagagtagagaagaatgaaactaatcagttgtatatgagaaatactcccttttcgattctaagaaaaaaaaatttgaattcatttcttgaaaatttccgtcggattacggtttccaacgaatagcagccttatcatgtttgtttctgtttccgagaaaaaaattcagaattcggaattcgtttccgtttccaaatgtttcgaaaaaattctgaccgacacttcccgtttccaaaaacacgtccggaattcggaaactttccggactgttttcatccctatctactactgctcgagctcaaccagcatttccagcttgttctaaaacataacacagatagataataatgggcctatagatagcgtgacgaggaggggataacttgcggcccggctaaaagagatggggattaaaccaattgggccgaaagatatgtccaatttggccgacaagctggaatgctgttcgagcttgagctggagcagtaatagagcaccgacagcgattagctatcgcatcaagcagaaacaggatgatctgtaagaaattactccgttctgcattttttttaaaaaaattccattccttccgtgctcgataattactgttttaatcacgtgatttcggattcaccaaccgcgacttgaaactgaaacaccaaaaaaaactccatatgcggcttggcagaaagaggccatgaattcaatcacgctatcagtacaacaacaacatcttaaacgtcccatttgattcgcagtgttcatcacacggaatgtatgggcagatgctagaggaggaataaagcaaaggaacacaattccaaagcaaaagtataaccgaagtcgaatcccaacgcgaggcaaacctcgtgatctccgccgtcggccggatctcgtgattactggttaaccgattgaagtgtctcattgacaagaggaagaagtcacgccatcttgcagtatataaggggggacattctttcctagctacgatcacgagctagcgagcgcgagcatcgaggcgccattcataattccatctccagatactgatcaagcagatcagagctcgagttatcatagctatttgatcaa

SEQ ID NO: 6617 - DNA, 2000 bp, Oryza sativa
tccaatgagaagagtttaatttgcatcacccgaacttttactattgtatttaaatttagctcgttctgtctatgtaatactggctgattggattttcacttatcttgacgaaagtatgctaatttccctccattttatgtattcagtggcttaaggaagctgaagaggaagatgaagaagaggagtagagctggagcttatgcttgcattcctttgagctcttggagaaatgcagcatttgccttgtttgaatggtctgccggtgagtttgcaagcggcaagttttgaaaacctaattgtttgtacattaatttaatggcatttttgttcctaaccaatctggtaaaagaaaggagcaacattgcccacgagccatgggttaaaacgactgtagagtgtagataagttaaaaccctttttcctatgtttgcttcgctgatgcttccatgaagttattttttccttctgatgaatttgtttaactgcccatctgtttctttgcacccagcacttgctcaaatctttaacaaaagcttagttagatatggtcctttggttctctcatctttctgctgagagatgtagtggggaagaaagcaatggagggttcttgtccaaaaggcgccaatggatcatgtgggttgcgtagatccggcactaatcttacctcaaaaggggcacggtttgtttaaagtacgttcttttttctccccaatccttttaattttcttcagttccctaaaagccttctatgatttgtgcaacaactgaacaagaggctgcaaaatcaaaggtcgatataaaaagagtgaaaaaaaaacagaacgtccttgagagccaaaagtggaaaagcttgtgagaatgagcagggcctgcgctaagcaacctctctgttcgggcttcctttggccctgttcttcgtcgcatgtgcacttgtaatttatccacttctaatacgggctggttggtggtgctggatcggcattgtttaatgttcagaagattttactttgaccataagaaacttcggaaaatgccgtctttgttaggttttatcctttcacctaaaataatctgactcggtttattcttgctgaccgtatcgtgatgtgttcaagattaccgccgaacaaacatcaccttgtcttttaccgtgggctcgtacaactgcagagttgaatcccaaattacaatctggacaaatgatgttcttgaccctgaatccattgtcagtaattctaaaaattcagagacaacactgcatggttgtgtaccatgtcttcgctaccagtgagcggtgagccgcacatatgcatctcaaaatatagttacttgaaggatttgaatttatgttaaaatatatgtatataaatattttttaccccatcccctcatctcaatagtactctatttactttttttcatctactttcttattttaacccatcgtaaccattaagaagtcatattttaagatgaagggagcagcgatcgttctcgtacacgacgttgccatttgagaatttgaggagtaagctgagctggtgtgcctcaggataaactgaaccgcatctgcatctgaatggaaagatagccgttgttggcagcatactactacaggataagctgtctgtcgaccaaaaggagtcccgccgaagcgtggcgtgggccacacacgagagatcccggagcctagaaagggagtcgcatgcgtttattatgttcttaacaaaaccgtcgtccgagtcagccaatctcccctctgacgccgtgagccttagcccttaagctttgcttgccacagcccacagccaccacctcctcgttctctccgtctcgtcgtctcccctcccttataaaacacatccaacccatgcagccgccaccgtaccccgcactcccgccgccgccgtcgtctacgtgagcgatcacgtcatcacatcgtcgtcgaccaaattaacacgcgtacgtactagcagctaagctgtatacatacgtgc

SEQ ID NO: 6618 - DNA, 2000 bp, Oryza sativa
ctgatttagctcgctcccaaccattggcgtgactcgaattttaagggtgctggatttttaacagaccggcacctaaaatatattatatattctggtttaaccgacacctataatatattaaagttgttggtatttttacaaaataagcacataaagtattggtccagttttctctagaactggtatacatagttggttaaaggtatcggtttatatttttccatcctgtggaggtgggaaaatgtctatagatgttgattttacaattttcggcacctataatttgtcccattggtgatgttctatattactagagcctcaacacgtgaacgccaacagaggctgaggaggagccgcgtgcccgcgaagatcgaggaggagctgcggtgactgcgagtttcatcacatcgaaggccgaggaggagccaagctcaccagcctccttgagagcaagaaagcttgagacatcgccagtcttgtcgccrcctacacgcgaggttgggctccacctctgcgcaagctccaccgtcaggcatcgggcgagctcgtgtgggagagtgtcacaatggcagtatgcttattgtgctaacgagatggaggcacaaccggcgagcttgacgggccagccaccaccgcactcttgagctaggggagaagagggagagagaaggtggggaatgaggaagctaagatagagagaggtgagaggggagggaatctgataggttggtcccaccgattcttttttaaaaaagttgttgactacttgctgcctcgtaggaccaaaataagaatggatggagtcaaatggttatttgtctggctcgaatagttgactgtaaaatgtttggtatttaagttaggggtaattcggttgactgtgatagttcgggagtaattcggattttttccgctaattaatctatgtacgtaaagcttccgccttctctttcgtccgtccgatcccctccctcccaagcacctctgcttctgccttcgcctccccccctaccggcacctcccatctctcccttgctgcaaattctcctggtcccccatggctcctgttctccttggcgcccctcctctcttgcctcccttccttttccccccccccaaatctcttcctcgctgcacgcgctccccctctcccacagcccctcttctccttggcaccccttctctcctgcctccctccctctcgattgcactcgctcccgctttcccatggcccctctactccctggagcccctcctctcccctatgttcccttcctcttgagcgttcaaggaaaacaaaaaacttatgtccgtgaacacgttttgatgtactcacccggctgtgttcaccacaagagatcrtcgttgccgtttctctctctatgggaccatgccgttgctggtcgtgttcccgttgttctggttttcttcgttgccgatcaccatctatggataagtcacattgtgggacatgtctagctaccttactcaccgccgtttgattactggagcaccgtcgcccaccttccctcctcatatgttttttttgtttcgggtagggaagacaataaactatgttagtcgttgtttctctctctttcrttcttcctgcgtgttcaaggaaaaaggaatcccctcatccggtaacgcgttttgatgtatactcctccggtcatgttcatcaacagtgcttgccattgtcrtttctctctctatcgggacacgttgttgcaggcctattcttgatgttctggttttcttcgttgccaacctctaccatctatggacaagtcacatcgtaggacacgtatcaccttcctcaccgccgtttggacgacagagcaccggcacacatcttccctcttttttattatggatcaaagtagctgacgcggtctataattttcagttggacacactataaatatgggctaactgtattatatatcagccgcgatgtgtgccaaactagagtaatatagtgtgtcggtcactgtgca

SEQ ID NO: 6619 - DNA, 2000 bp, Oryza sativa
atacgcggagtgtttcttcgctcattttctcctaatcctctttcttgccccgtaagaacaacatgctctgctgcttccttttttatcggagctgctgatctcattctgtcagagtttaggaaccaggagagtaaactaatcttacggtccaagaacaggacggcacggtccgggaataatctaatccaagcctgagaggaacattctttatcggcgaacgtgcgaggctgtgtcgcggataaacaaatcgatcaggaaacagaaaagaagctcaactgaatttaaacacgacagctaggctgaacaccgggttagcaaacagctcagattgatgcttccttccagcttgcgtattttcctaagcagggtttaaattacaaaactatcataatttatgcgccttgatctgcagcgcaggacaggatggttcccatctcctgtaaattccagcagagattttgtctgcatcctgtacggttgttcggagcgtgcggttcagtttcagttcagaactgcctatcacagtatcatctcatctcgatcgactgcaattgcataattgcatttcactcgtgcgtggaaggatcatggagattaaattaaaacgagaatggtgagccagaacattgtgggaggaactgcggctggaatcagattccttttgctgcagatctacctgcttcaggtagcaaccagatgcagctcatggcttcacctcctttgcatccgctgctttgcctcccaaaacaactctggttttagcatccccagtctgaccactcccagttagcctaaaaggaaaaaaagaaaagcagaaacacccaactagaagcaacatataaagaatgaaatactttgcacgaaatttttcacatgatccaagcacttggaattgcttaatctgttataatcagtttagtatcagcatggagcacgctggattaattccgctataagcaaccctcccaagaactcacttgttttacaagtatgtcagcgtcacgtttaagcagagagtaagaaacagtgacgcacgcagagaattccattccaaccccaaaaatagaacagaaaaattgctaccttccgtggcaaggaagaaatgaccaaacccacagtgccagtacatgcggtgaaaagcagccgagactgtacgagatcggtctaataaaagaatgatttttcaccgttctacaggtctgaaagaatgaattttcaaaattcaaaaagaaaaaaaagagagaatgatttttcatcgtttctacatggaaccagcgaggattttttttaatcttttgaacttttatttttttcaattttaaaaatagaccttttcaaaacttctttctataatccgaaccaatcgacgtgatatggcaaaacaatactgacacgctacacgcagtggacatgatagttttattctgtcatgccagcaaggatggcgtggccacgcccgtcaaatcggcgtgaccaaataacgcggagtgacaatgttgtttttttacaccagttcggctagcgtagcccaaaaggttaatatcttgaaaatacgttttgaaaaatgtttatttttaaaactaaaaattaaaaagttcaaagaaaaaaaaattcaaccatcaatgcagcagcggaaacagtaatagtactctctgccaacttaccaagttgctgcgggggactcacccactccgctttttttgagtcgtttcgtggccggttttgacgccgttttccgcagccctcggcgtcgccgtccgtgcgtggtttcgtgccgcgcgacacggtcaaggcacaagccacagccacagcgcctacatatctcgccattgccggtgcagacgcttcctcaactctgtcctctcttcttcttcttctttacaagctctggtactcgctgtctccgtctctgcatttcggtctctggctctctgctgcttcgtgttcgtgggcgattggtttttcttggcttcttgttcatcttggatttgatcgattcg

SEQ ID NO: 6620 - DNA, 2000 bp, Oryza sativa
tggtgggtgggaaatcatttccctatcccatttaccaaacatggccaaaacaccgtctatcataaactgagacaatacgaatggcaaatgcctaaaaacaaaaaataccaaatcttcctcctccaatcaatctattcatctctaaaaaccgcgtctcagattattcatttttcattcccaacgcgcaattatcaacatctcttggagctcatctgtcaagcaaataaaaggagtcggttaacatttcatcattcaaaaagtagtcttcgtactaacataacattaacattaacatcagcactataaatcatgcaacatgtcgggcgctaggcgcaccaccactgcacccagtcgccactcccggataaagcccaagaatgcagatagagagaaacgcagtgattgcgggcaacctcccaagtgtgcaaatgcaattagacagacaccaacaaccaggagcacatgctcacctttcgccggtagcgtcagtcaagctgtccaaacaccgtatagtacaggtatagagctgcactgcaggacgggctgcacgttgctactaccagcagtagcgcctgctagttttgttgccttgtgaagaagccactgctatcccagtgtcatcttgtgcaaggccatcacgtgtatcgtactgatatatatagtactcctcctcctgctgccgccactactactaccattgccaagccaggccaggccagaccggccatctgcattgcatttgctctctctctctctctctctctctcggcaccacggacactcgtacagctgccgcctgccggagggttggtggtgtgtttcaggttccagaaaaatcctccagctttttgtggtcgcttgaggagctgagctgtgtgagccttgcaaggtttgcatcaacaagcttgggggtttttcctatcttgttgttctgagggaattcaagaaatgctccaaatggtctgaattcgtaggtttatttgggctggaatctctcagagggtttaaggtaccgttcctttcgtcacttcccccaaagttttagcctgcaaagtttgttcttcttcttcttcttcttcttcttcttcttcttcttcttttttccctcttgctctgtgtctgattcttcctttcccttttcgtttkgtttctccacttgtgaataagcttttgttttttttacattcagtagtacccactcactagtagaaatgttcctctgtttcttctccactactgttggacatgtttgcttgctgtttgtgggttgtggcaccaagaaacggatggttgattgagggggtgggtgttggtgtgttcctgcattttcttggaagcagcagcttccagatctgagatggcagaggtattttgcggctcatggtttgagttccatttcgagtgaattcgttcattccttccttcagtttcttggtttatttttgaggggtagtttcttggtttatcttggggcagttttaaagttttcccctcttttattagctaatgctgctgaagctgtacatccctggaggctatcttctccatatttaatggattggtagtatcttagattcctagtttattggattttctctctcccgaattttgggttttggaatagatgttctggatctcatagacttcaagagaggcagttctgctatttaaattgctatttctttcttcagttatatatttttttctgtacctagactgcagataattttggtctgagtgtctcttaaaaaaaagagataattttggtctgaatgaacagtgaagtgttttatttcactgatttttgtccgtatcactatattagtagttattttcatttttgcccagacttcacctttttcttttttgttgttgtgctaaaagaccaaattatcactttcaatcactgaagttcatctttccttggttgctaactaaattatccgttgatcagaggaaaaaggaaagaggagaaattgtaaggacaagtagagaagaac

SEQ ID NO: 6621 - DNA, 2000 bp, Oryza sativa
tcttcttcttcgcctcctcctcactacatgccaccacccaccagtcatccaaaattagcatcgttctatgatgcacaaatgcattgggtggttcaattgagttacacggtgttgcaattaccttcccacgaccttggcgagggtctggatgtagcagtcgatcatctgctgcttggtggcgccctcgccgccgggcttgtccatgacgatgagccagtgctcgtagtcgcacccggggaagagcggcgccatctccgtgggcgcgcggtcccctccctgccccgaccgcagcggcgagtacgacgactccggccgccgcgccatgcagcggacggacccggcagcgcggccgccgcgaggccgcagcgggcgagcggaggaggacgacgccgtcgtgaggcgccgcgacaacggaaccccctgcgccgggcgcccggcggccgcgacggcgcgcgctgctgctgcggcggtggccatggctgccggcgaagagaaggggaggagaggagscgragktggtggtggtggtggtggtgaaatggagaggaatcggatggggttttgattgggtttggagaagagatgagatgagagagatatttgctgtcgtgttgggcttgggctttgatactagcgggcttcctaatccgattacacttgggcttcccattacggcccgccaacgatatgacgaaacgggattaattaatcatcgtcatgaataaataagcttggaacccatgggcgagcagcacgaaggaagatagattttccccatcgaaatctcgtcgcttcccccgggttcgattcgagtcttctctctcgcaggtatggtgaactcgatccctctccccgcgatctctctctctcgatttgtgttcgtgttgctatcaatttgaccggatctggtaggaatcgactgcgttcggtgctgaccctaatacgttttctcgattttgatcctgctcgtttgatccgattgggtgatagtaggcagattgagtaaatttgttgattcgctagcctctgttgctggatcttgctcgatccttgctccctggtcgatttcaccgttcccggccatagcttaattggcctccgattccttgttccctagtcgatctggctgttccatcggcctcgatttcctcatcgtagagagttcgcccgccgcctccggctagcagcggcgccggcgtctttctgcttccaccgcatcctcgccggtgagcacccgtactgacattctcattctcttctccaccgacgccttatctcttcgccttagccttcagcttgtcttctagatctggaagcttttctctttcccttaaccttaaccttagtacttatagcaatttgattccaagaaaagatcggtagcaattccccacgttagttccgcccctggttgatataatccaaatctttatctctatgcgtgtaatagtatgatctatccagcttgttgtacatttttttaatgtgcagtagggtgctaatagcagtttgtattttggggtttaacttgacctctatgccccagcttgtgatcgcccctgctaacttctgttggtggatctttacatgatattattgttttttataagatagctgggtaggtctattcatactatacacgagagtccatagttaattcattaatccaaagtaattagaactgaggaacaggcaatacgcgctattactgttgtagttcagcaggttgaaacagaatatatatgaacaaaggttaggtccatggtagatttccagctttatgtgtggaccattatatttttgtgttgtaaacaacagtagcatcagatctttcttgttgaatgtagtatgatcatatttgcttcctgtttgtttactgttagtattgagatgtgccatatatttttggacttttgatggttttacctggccttctgatcaagttctttttttctgagttctttttaattgattctgattcttccttcagcagcacaaag

SEQ ID NO: 6622 - DNA, 2000 bp, Oryza sativa
cccacgcgcaggagtagggtattacgctccatagcggcccgaacctgtataatcccagctctcacgggcggtctcaggagactctaggcggatatacgttcttgatcagcgcgccctttcccccggccgaactcacaaaaagggggggtctctcgatcacccgctagagaggatcactcctcgacagtcgtcgttgtcgcctaggacttctcgcaacgagaagaggtggccgaatctcggctaaagaggagaggtgattgggtctggtatgccgtcgtcgcttctccatcacgcatcggcatccctcttctcatctctgccttgctagccgtgcagagggattaaggaagggaagagagatgctgtcagcggcgacgaccaagggccccgtggcgacatcgtcgtcatgtgtggagctccgaacagtaggaggacggcggtggcgcgagacacagacctcccgggcgaaggagcgccaaaaagggaggatgcggtgactatagtggccatgtccatcgttggtcatgcttgctgctgttggcgccgagccaaatcaccgatttctcacattgtagaagagaaaagaggggagaaagcagaaagtggaagaaggaataagggggaaaagggcaatgtgaatccaagggaaaaatagtggcatatttcaaatatatgtaaaattataatggcaatgttactaaatcgttaatactagtagcatatttcaaaaccgacatatttctaatggcatgaattcaattaaccctaaaagttagagaccaacgagaatccctacccttactagtgtatagtggcggaaacaggggtagggtagctagggctgctgccctactcctaagcctaaatatccattaaaatttacatgtcaaaacctcaaaacatggaagataaagataaattatgtacattatactggttaagccctaggcttgagaaaattctggctatgccactgctagtatatacaacaactaagcatattatcgcctctcatgcctcatgggtcgacgcccgaaactttggatcaccacgctacctggtccccttcctcctccatttctttgcattaatgtcagcaacgaggggaagggctgaaggggatcggggatccgtatgatccctagggccccaaaaacgatatttggcgaacttattcagttggaccacacctatattgtaatacccttgcgcttttgtcctcacttaatgcaaaaaggttcgaatcgatattactaatgatcaagcaactcaccttatcaattaatgtgcatcaagcttgatagcggagatatgcactaaattggacataatacttcattattgacttctattttcttaacaaatccattccttctatgttcttagctcatgccactcctatctagtagccaattgtccaaaaaatctagattttaactcaataaacataaggatatgacatttgtaattgtcgagtaaatgctcgttcaaaaaaaaatgttgagtgaatacccatcctttaaagctacggccgccactattgggcatggtcaccggtatctggcagttatggctattgtgtctgggtctgacaaagaaatattgcatatcagatcgatgttatttttgctctatatgtgtccaaaccgacccattgtaatcctacccacccatagatctaaggtgcgaaatagtccaacaaactaatatatttacatttgttttgacgccatatgaaatttgcagtcaaaacttaaacttgtaaattatttatagatgagaaaaatcaagatgtaaaatgtgaaatagtaacttcttcataaaaactccttcataaggagtagtatttcatatggcgaatatacattccttattatatgttgggtagacaaggggtaggggcaagtcaactcgtgacggcacgcctcgccacgacacgacacgacacgacacgagagagatctcggcgccggcgggcggcgccggcgaggcgtacggca

SEQ ID NO: 6623 - DNA, 2000 bp, Oryza sativa
ggggacattccttgaggtttaaaaaagtttcccaagaacaactttaagattcttaaggatttgataccgtaaaactgtaccatctgggcattttcacccatcagtttgttgaaacctgaccttttttcctctcgttggcaaccaatcactagatggattacagtgggtggcggaatggcaaaaattactagagcataacgtgtcacgctttgaactcaaagaagaaggtggttttcaagaagaggttgcaggttgggctatataaatctgatagcacgttaaacaattctttttttttattggtgtaggaattatgtagtactatgctaagttcattttctcccaaccaattttacaaggtgttctatgggtcagagtaccaaagagtaagagtgaggtgctaataccctctaacctatgaaaatttctctttacggatcggcgagcacatctacaaatcttcaattgctctgttattttagacgatctaacaattctcaaaacagggccctgctctgctttgcttgcacgcagggctaagcaatctcacggcgaagagtcacatgccacaaacccacgtytcccaatgtgcgcgcttgctttgccaagtgcattgcccttttgttgcatcagcttagtgcmagtycsrtgcacggttcactggctttcttgcaatctctgtgtgctgagagagtkaggcgtccctgtcaatgacagctttgttcgaaagcacacgtacactgatgacacacatactcccccgtcaacaccatgccctaacttgaacacgatgagacgttgcattcatccggacattcattgagatwatgaaaccgtgattaattcttaaacagccctttccctttcctgagttacaaagttttcttcagtagttgttcctgtcaagcggttgattttctttccaatccccaaatgcaacccatctctttcacctcgctaacccgagcacgtttaatttctcattgatcagacagcatttaacacatcgtgtcgtagtttcattagctgctgatcattccaaacagtgagacactcaccgggcgtgcaaagcgtgccctggtttcttcttcgtctaatggtcacacggsatcgttttcgctcggaggaagaaagcgrtcagatttgacsccagacggcgcaatcggatctgcatggacatgccccgcataacaatagtttacacgagaacgtgaatcatacgaggctggcaaccaaatgcagcatgatacccaggaaatttaacaattccatgatgagagctgtttcaattatatacgtagaagtattatggaccagacctcccccatcaacatccatgctactgtaactgtaagccgcacatttgcaaggaaaggaccgcgaaagcagcgacgtcttagtttttcttttcttctttgaaacggaccgtctttgtattttcggatcgcaccgtgcatttctcgtctgattaggtaggtagcaaacggacgatcatttggaccgtctgattaaatatcaccggccaagtttggcagacataattgaacgcaatttatttgcacaatcgatgggaattctggtagtaccaaacttgtataagccatttgatgaaatgttttttgtctcatattttccagtcccctcaccaacacttgtttggttgtctagcaaccatatcattctggctgccaacatggcagagtggtcagaccgcaccgtgacacgtcgactgcaacctagcgggtgagatttatcgctgtgcatcgttttcctctcgaaagctgcataaaaaagagagagagagagagagagagcagaaaacaattcgctcgtgtcctttataaataccctcacgccacggccagtaagcctccccctcccctcctctcctctcatctcctccacactttgaggaaacgtctaagcacaagtgctaaacgcgattagaaggcagcgaaatcgtacactaaattgcacggattagagatagatctcaagca

SEQ ID NO: 6624 - DNA, 2000 bp, Oryza sativa
tagaaattctcacattaatcggagaaaaagaaaaaacagagtccatatagaaatataatttagaaatagctaaaattcggaattaaaaaataagaaataatagaagaggagactagagtccatagagaaatacaattaggaaataactgaaattcagaattaaaaataagaatattagaagtagagtatagagtctatatagaaatacaattagaaaataatagaaattcgaaattaaaaataaggaatattagaagtagagtatagagtccatatagaaatacaattaggaaataatagaaaatcggaattaaaaaataagaaatattagaagtagagtatagagttcatataggaatttaaaactatctaaaatttgcaataaacataataaaattaaagtagagtttagagtccgtataaaaatacaattagcaaataactaaaattcgaaattaagaaaaacatgggaagaagtgtttaaagtcaatatagaaatacaatttagaagtaagwctgaaattcgaaattaaaaattaaaaaatattgaaagatgagtttagagttcacatagaaatacaattagaaataataaaaaattcagaaataaaaataaataatattggaagaagagcatagagtctatatagaaatacaatttacagaaaatcagaattaaaaaaaataaatattaaaactacgagtctagagtacatatagtaatatatataattacaaataactaaaatttggtattaaaaataattaataactaacacgtatataaaatataatatgaatattacatattagtagttttgtaaagttattgcaaaatttaaaattatgttgccattttaatatttttgaataatataatgagaaaacatatatgctattatatgagagaaaatataataatgctagccgcgcaatatgcgcggggcaccatgctagttttagtaaatacataagaaatcctgtcaaaattttggcaatattgtcatcttgccatattgccaaaatttaataaggtttattttggctacaatctgaacaagcccttaattttcagtgttagtaattttcatttaactaattctagcgaggactcttgttttaatcagaattgccatccttgatttatttacttttttatttaattaacatggaatgtacgagccccatcaactggccaagagctgatttgatgccaaaacatggctcattagcgataaaaaataatttataaatgaaaattttatatatgtgtttttaattagtaacttaaaagctaatgctacaaaagaaatacattaaaaatattctaaaatcaactacagaattatgttttgaatcagattttagcagcggttgattttatataggacaaacaatgaggctctaattccaatcagtaaagctagccgaatggcattcccttgaaaaagaaaacaatgaggctctaattctaggaagtgtccggcaaaagtacgtgtacaacaaggataattaaattcatgatggatggatgaattgtataatgtaatttggataccaaagaagaaaactagcaaacataggaaataaagaaaaaacattaattgcgaaacaaaattcgaattggttttagctagctgcccttaggtggatgtgcgccaacagagacgatcgcatgaaggaaggctgcagcctggaacagcctcgcctcctccagggaacgggaacgggaagaacaaaaggaagctttacctggagcccacaacgctatccaaggctttatctaacttcctattggcctcctttttatcctcttttaaatgagcgcaactcgtcgccgccgtgccgttgcgtttctcgttaggagcaactgaacttatccaacgaattgaacaatcaattcacccggagaggtacgtctgcatgccgggctgcacctataaattcccatgcaccagcattccccatccacacaactcagcttgtatctgagacacgca

SEQ ID NO: 6625 - DNA, 2000 bp, Oryza sativa
gttgactaaacgagatgattaatgatttaaggagactaccttaaaaccagcatctttagccaaacaaaagcaatcagcaacagcagctacagtgtgacctctgtttgtgtcacgtgcaacatcctcgtatgtgctctgaacaccaatttctaagcgggtacaaccataagatagcatctggcgcaaatgaggccccaagcaataatcaggtctcctgtaattttgaggaaagacaacaatagtttatagaactgaagttaataaagatgtttcatggggaaatcatacagaaccatcaaggaacctaagcatatgggtagtttagattgtcaaatgatcttacgtctcaattgtcatgccaatacatttgactgcaccatgttctgaataacaaacagcctcttcaacattagcagaagtgtgtcccgataaggcatcatgaagatttctaatgaaataatcccgataatcagctggtaatgacatgaaagttccacccatcaatatgaattcgacctgcataatgtattcaaattattttaaacttatgatagcattaatcaaatgtaactagaaagtgaatcgaattactcaaaccaagacacaacactctcaagggtaagggcaaaccttgtctacactatggcctagccttttgagctgatctatcctgcttctggcctgcacatatggattgtacctacaagtagacagatcagaaagttctgaaacccaaagggatgaagcagtcaaaataatggcgacaacttcatggctatatcgcccaacacaatctgttgctatagaactgccagaccaaaagatcactagtgggcattggtgtactttcttgtttcattagctagtgaactttgatcacagtaattaatgagttgtgcatcatttgtactcctctaatgcaagtcttcaatttcgacaaaataactaccccgtggcttgctgacaatcgactaattttcaataaataacagaactctgccttcacttgcagttcagcatacttcaaaacaacactagagaaagcatcgccgtgcagctcatctcacaggtggtatagtatttccaagtgacatcagtagccagtgaggtaaatcaccttgctcgaatggcgcgcatgctggtgggctcgtagccggtgtaggactgggtgctgtactcgaagtcggagtcggggcctccggggcagtacacgcagatgttccccgtggtggcgatgtgggggcaccggtgcggcttcgacatcacggcgaccacggcaatgcccgacgccgtgcgcacgggcttggcgcgcagccttgggagcagcgcggcgcggtcggcctccggcaccgccgcgatcatctccaccagcttcggcgcccgcgccagcccgtacctccggcacgcggccgacttgagcgcgttcaggtccaagtcctcccctcgccgcgagagctcccccatcgccgacacgatctccgcgatggcccgcacccgcgcctcctcctccgacagccccgcggggagcaccactccccctctccccggcgccggcttcctcctgcgcggctgctcgccgccgccgccaccgccggcggcggctacggcggtggccatcggtggaaagggttttgggtctctcggtgagagctcgggatgtagcgtggcgtggcggcgcgggtcggaactcggaaacggaatggggtttggagtttggactcgggtcggtgttgcgctttgcccttgtacacgtgccgtactagatctcggccccccgcacagccgtcggatcgtggtacggacgtctcagataagaccacgtcgctctgcaacgtcgtagtagcctggaaatactctcccgaattaaaaactttggaggacgaaactagccttctctccttctctctcgtgttctctcccaatctcttcttgcggcggaagcaaagcgagaagcgaggcgactcttctccggcggcggcggcggcggaagcggcggcgag

SEQ ID NO: 6626 - DNA, 2000 bp, Oryza sativa
aagggaggagaggcgaatgagcraggaggcggcggcggcggcggcggcggcgggrgcggcgcggmgkgagaggagtcgttmgkkaggcggaggagtaggaggrgcggtggtggtgatggggtggggatgggggcggcggcggcggcgggagggtgtgggagttcgagcgggatctggtggccggggcggcgatkggcggcgccgtgcacacggtggtggcgccgatcgagcgcgccaagctgctgctccagacgcaggacggcaacgcggcgctgctgggccgcgcgcgcaggttccgcgggttcgccgaactgcgtggcgcgcaccgtccgcgacgagggcgtgctctccctctggcgcggcaacggcaccgccgtcattccggtactacccctccgtcgccctcaacttctccctcaaggttcccacccccaccccgaaacccccccgccatttttgttcttactgtttgtttgttccttgttgtccgagttatcgattcgtacgttacaaccgcatcaatattgcttcggtttgagataacagtgccagtgcgatcttgtgggtgttttggtgcggcggatttggggttcatggttccattccttgcttgatcggttcgtatgctttagtgtgtgattcgatgagcacaggaattgtggtgatgtcggtaacttcttggtttggggaagcatctggtactggttctacagcgtgcggtgtaaattcttgaggatgagagattgtattaggtcattagattctgctgggatttcactttcgggggagaaatgtttgcggacggaaatagaaaaggaatcaaagaataaagtgctctcgagtcttatgaaagagcactatagactagcactcatgaacactaaatggcatcttgatgcacatattctcacaacatttgtcgtacttgttagtcattgtttccaatagcagcaatgccagttagcatgtaaacctttttgttctctattgaggatctaggagataggaacagtactgtacatcgatataaatttcatgattggttcatttgaatggtactccaattgtaccacactagcatcttgctagttattgccattatgtggtggtatcttgtgaactgatccgtaatgaacatttgattccaacaacagtgatgtaactactaaattagtaagaaggcattatgtggacttgctcatgcgttaaggactgtcattgttgtcatggtgttcgatgcaacatatgttgttattaatgtgtgatgaaataatcatatatagttactgattacaaaagatgtacaaaaagatctgatgccaaatatgagaaacttagaaaagcttttgggcaagatgacagccattctctaaaataacaaatggcaaagcgacattgctaaatggatatttgagttgcacctttttaagcagctgtaggactgtaggagttgcaggcacttcctgccatagtcaaatagcatgaccatgatcaaatcccttgatatatagtcatattataactcaagaaacaaatagattgcatctactgccagctactataagagaaatatacattgtacggcaatatagaacataacagtgataactatttgaagatggccaattaattatcgtgtttttgcctctgctgattttcgtgatactatttgaagccaggttgccctgtgacttgtaccgaatgcatctgagcttatctaaattgcagcagggtactgctttgcctttactcacttttaccaaattattcttgaagatttatgttgtggattatggcccatgcaacatatgtttggttaatgttaacatctcttcagatgtgtcgatttgacttgatgatttccactcacacttagctatgtttccttgatgctcaattatgttgaaacaagaattgctcatcttagtggcgaaagacatcgaatgtatgataagttgataaaccataatggtataacagataataaccgatgagcaact

SEQ ID NO: 6627 - DNA, 2000 bp, Oryza sativa
acccggattccggtgccgtgtgcagtccatacaccgagatgatcggtgcaaacgtgcagtgctatgctccgtgtgcttcggcctgtcggcctctcgggagtcgggacgggaggacgaatacaagagcctaattgcaatgggccgctcgtgggccgcagttaggtttcggcccatgcgtgtctacaagccaaaagccactggggaacagagaaaatccatcatctcacggggccgtaccgtaaggagaagcatgtaaataggagtttcctttattcactccaaagatatacttccttcgtttcaggttatagacaaactattctaagtttaactaagtttatagataaatacagtaatatttataatactaaattagtttcatcaaatcaataattaaatatattttcgtaataaatttatcttaggttgaaaatattactaccttcttctataaacttaatcaaatttaaatcagtttgactttgacgaaagtcaaaatattttataacctaaaatggagggagtagtaaaagttgaatgtgaaatggttagcactcgataataacacgtaaaagctaaagatcgggcatcttaatttgtcatgtcgtttggcatctactcggcacgatgatgaacgagcttcactccccacggcacgtcgtggcagctctggacgtgcggcacaaccctcgccggatcggcgctttccttcatccggcagtcgtatacaacagtcctgttgcggtccaacaaatatggaacgaaacagtcccgttctgtcccaacgtacatgggctgctcgtacgccgtaatccccaattaggcccaacttatatggtcctcacgcgtaagcaacattccctttccagcccaatctatatgggccgcaggtaacgtaacgcgagatgtgcagcccccttctcctcctcttcctctccgccatcgaggacgttgagcccgcggccaccgtgatgctctccctccgccgctgcctccctcccctagtgacgagttccgcgagactgtcggcgcagatcagaaggatctgacgcgtttcggtttctgttgcagagatctccatagattaatcatccacagaaccggtcagtgacattcagacaacacctgaacattgtgcaaaaaccaaattttattatttttggtcacgtcgcggcatgcatctagtacgcttctacagtctggatctgcgtgcctggcacgaagccacgaacagagcagttgacttcacgacctgggtaccaagatgttctccctatgaatttgctgctctgatcccaggtctcaaaacctggtgttggtgtcagttgagaggaccaaagattgtcacaatatggcgaagcgaggaggaggacggccttgggtcatcgtgctcttctcattgcctctgcttctcgtgttcttgctgtccgccgatcgccgggtgctgatcgcatccgagtcccaagtgcttcggctcataaagggaagaggtaaatgacaagtcgatgactcgtaatttaatgtttcatacctcgctttatacgacatttgtgcaaatcatcgtactatgccatcgagtctagagaaaacaaaatcatttgagctcatgtgaaatgtgtcggtgactcgtagtcttgcccatgttaaaatttctcgtgtcaatttcaacgctagcattggcatcagggaggtgttaaaatgagtgtaggtcaacttgtcggttaagaatagttaatttccatctcggtatcctttaacaattgtcaacttacaggtaattacaaatctgagatcggaatcaaagtgtttctacactagcaaccaagattagtactaaccaataaccatagcccatagagctcgattcacccacagaaagaataaagaaaacgaagtatggcacgcagcatctgcatttgcatcttagcagaaaactaagtatagccaagtaggtggtagcctacataccattctaccaacgtcgccggcggagagccgag

SEQ ID NO: 6628 - DNA, 2000 bp, Oryza sativa
gtagttcgccagcgggaaccccggcggcagcagccacgtcgcgccggggaagggctcgcagaacagctcgtccatctcgttgctggggtcgacgaggagcacgcggtcggtgagcatcgcgtacaggaacgccgacgcggcggcgaggatccggttgccgaggccgcggtaggagatggagaccaggtacctgcactccgcctccggtgacggcgacacgatgccgccgctcttgcccgacctcagcctctccacggcgtcgctgtacgcggcggtgcccgggccgcaccgccgctgcagctcctcgtgccgccgcagcttggacacgaggtgcggcgagggctccctgccggcgtttcgacggtacatggcggattggtacctgctgtggcatgatccgtcgtccaatccgtcggccaggaggccgccgagaagcttgtcgcgcgccgccgccgccgccggccattgcaggatcgagccatcgcctgaacaaacgaaatcaattctcagtttctcacttcgtcagtcagactcagacacgcatcggtacacggacggcaacagaattcaggcttgcagatactacgttgacaattgactggctgcaaactgaactacacacttgacaattggatgattgacacgcatgtcaacgtctgaaaccgtggccctgacctcggcgaaaggcgttgacggagctaatccagacggccggcgcgccggcgccgcgggcgtcgaggaggatgaccattggcggcacgaccatgacgaaggcggcgagcacgacgttgacaccacatctccaagccctgcgcacgtgcctcttggccgtcgctggcaccacgccgtcctcgacctccggccaccggccggcggctgagcgttgcttctctttccgtagtggcacggcggcggcggcggcggcggcaccgccggatcccatctcggctctccgccggcgacgttggtagaatggtatgtaggctaccacctacttggctatacttagttttctgctaagatgcaaatgcagatgctgcgtgccatacttcgttttctttattctttctgtgggtgaatcgagctctatgggctatggttattggttagtactaatcttggttgctagtgtagaaacactttgattccgatctcagatttgtaattacctgtaagttgacaattgttaaaggataccgagatggaaattaactattcttaaccgacaagttgacctacactcattttaacacctccctgatgccaatgctagcgttgaaattgacacgagaaattttaacatgggcaagactacgagtcaccgacacatttcacatgagctcaaatgattttgttttctctagactcgatggcatagtacgatgatttgcacaaatgtcgtataaagcgaggtatgaaacattaaattacgagtcatcgacttgtcatttacctcttccctttatgagccgaagcacttgggactcggatgcgatcagcacccggcgatcggcggacagcaagaacacgagaagcagaggcaatgagaagagcacgatgacccaaggccgtcctcctcctcgcttcgccatattgtgacaatctttggtcctctcaactgacaccaacaccaggttttgagacctgggatcagagcagcaaattcatagggagaacatcttggtacccaggtcgtgaagtcaactgctctgttcgtggcttcgtgccaggcacgcagatccagactgtagaagcgtactagatgcatgccgcgacgtgaccaaaaataataaaatttggtttttgcacaatgttcaggtgttgtctgaatgtcactgaccggttctgtggatgattaatctatggagatctctgcaacagaaaccgaaacgcgtcagatccttctgatctgcgccgacagtctcgcggaactcgtcactaggggagggaggcagcggcggagggagagcatcacggtggccgcgggctcaacgtcctcg

SEQ ID NO: 6629 - DNA, 2000 bp, Oryza sativa
aatttttctagtgcttaaatttatttacttgccaattgggatcttggagaagggagttggtgaagggattggtcattggtgtttaacttttactcccaatctcttctctttttttttaaatttttaaaacacaatacaaatacagacgctaacaacgcagttacacccaccccctatgaacgaacacacaccctatctctattagagtacggatgtagataaatctaattcgaagtgatgatgtacggtaagatttaggcaaaatttgctacaggacacgcaaaaaacgcgtaattagctgagggacaccgagaaaacgtgaaactgcccgaggacactgcaaaaattgtgtaattgggcatatgacactggtcgcattattttattatttccaggtcaaaagaggtgagatacttttctaaatgcacggattgccccttctctttccttctttccctttcccgttgactttaccgggaacgcgtgatgcggcgaggtcggcgcgatgtgggcggtaaaggggggaagcaccggcgtgcggtggctaggcgcatccctttcccctcttcctctctctcttctctctctctcacggggcacgcaagggcggaaggtgggcggcggcgggcacagctaggtgccatgtggcggcgcgcgcggctgggtgccgagtgtctggcggtgacgccgtgcccgtccacctccccgtcgattggttggttcttaatggcttcctcaagcgggagaggggggagcacggtgtcggcagcggcggggggagggggcgtcgtcagcggtggttggtgcggcagttgcggatgcggaagcagcgccacctcgatggcctcaccgcacaggtggcgcacctccgccgcgacaacgcgcacgtcgccatcgtgcttggcctcaccacccagggcctcctcgctgtcgacgccgagaatgccgtcctccgcacctaggcctgccgagctcgccacgcgcctcgcctcgccactgaagaagaaaatatacttgccatttgggggcaatcttgtcattttgaaaaaaatactcgccactttcagctagaaaataataaaataatgcgttcggtgtcatacggcaaatttcacatattttgcagtgtcctcgggcagtttcacattttcacgatgtccctcagctaattacgtgttttttgcgtgtcctgtagcaaattttgcctaagatttatctcgttgtactaaaaaaaagggaattgccttccaagcatggagtttgctcaaagtgcccctcccaactccaaaaaaaactcttatatatccaccgatcaaacaatagacataagggtatccacaatgtggtgtaaaagtagtccataagcaataaaatatttcattcaaccacctattaccattgtgcaactagttcatatagaaaaaaattaacaaaaggtatccatatacatatggactacccatatggaataaattatattatctatctctactcttctctcttctcctaatgataccttgtatccatatacattgtggagattaccataggtaaaaactatttatgtgggtcccattcatatggatcattttgccatatacattagtgatgccctaacaatctccacactccaaactctcattccctctattatattcccctaaccaaacaagctgttaattagtgacgcaaaccatcaaccatagggcctggcccatcagcccatatagcccatcatcacctcagggccgaaactacctgctgggccgttcatccaaggcccaaggcccaaggcccaaagcccaaatcgcagccgaacagaaaaaaaaacaaataaaaagagaaaaagaaatagaatgaagtgaaagccatcatctactagcagcagcgaaagccaagaacgccaaaaaccctcgctttgctgctgctcctcccccttctccttcggctgctgatcggattcgcggcgtcccaggctagggatccgggcggtggcggcg

SEQ ID NO: 6630 - DNA, 2000 bp, Oryza sativa
caaaggctgtgttcggcaccccggcatgcaaaacagagcacacgttattgcacgattaattatgtattaactaacttattttttaaaaatgattaatatggttttttaaaataactttcgtatagaaatttttgcaaaaaaacacatcatttagcagcttgaaaagcgtgcgtgctgaaaacgagagatgtgagttggaaaaattgggataagaactcagccgaagaaagtttcgttgtctacaaaatacatacccaaagtaaagttttgtcgttgtagacatataaaattgggaattcataccacgatatagacatttatatgccacaggttcttacaatgcatgcatcaaaatacatacaatttgcgccaatcaggtgctggcaaggaggaatttaagcaattctattttcttttaactaaaaaatttcggaaaatctcgtgtttttatggttaaagttgtagaaaaccaatgcttatatgatgtatgacacataatgtctcaatgttgtataaaaccccaccttaattaaaatcttgataaatgtcagcatattttaaacaaaattttgaaaataggraagaattaaactatcaaccttagtaaagaacttcaccattaaaaattttatatattaattttgtgctcaaaatgcttaaggtggcattttgtaaaactttcaaaccataatatttggggttaagtggctcatgtaataatacctatgatttcttttttgcaattttgaccataaaacctaggtatgcttaaatttactcttttttataaaaaaattaaccatttagatgactgaaatgatttttttaatcttagtgtttgctaaataaataaaaaaacttataatggaatggatatgctacctctatcccaaaatatatactccctcattccctaaatgtttaacaccgttaactttgttaaatatgtttgaccattcgtcttattcaaaaacttttgtgaaatatgtaaaaccatatgtatacataaaaatatatttaataatgaatcaaatgatagaaaaaagaattaataattacttaaactttttgaataagacgaacagtcaaacatgtttaaaaaaagtcaacggcgtgaaacatttagagatggagggagtagtaatttttacaaagaatatagacatattcagattcataagtaaaaaagcttatattctgctctctccagttcaagttaaaagtcgttttgattttttttcaaaattaacctgttccaagtttgactaatcttgtagaaaaaaatagcaaccttttcaacttaaaataaatatattatgaaaatatattcaattatagtttttaatgaaactaatttggtgttataaaaatggagtagaaccaaggagtatatataacgtaaatggtaaatataactgctgcaaaagctgcagctacttcctctcgcgagccgcacatgcaggctactactactagtagtacgcgagaaattgggatgcatatgcgacggcgaggcatagcttccagctaccttcctgcggcctccccggaacattctcctgtctctcatccatccacagtctttctgtcgactgcaggagaaaacttgcagcaacttcttcacttcctctgttacaattcctaggaaatgaccagggccctctatctccatggcctatatatactgctaccaacaaaccgtttctctcgagcatattatatagttagtgtgcaattatggctaagcttaattagctagctagccatatagtttgattaattgttcagttcggcagacaggtactttcagttgcgttcatttttatctcatcttaattattgtgtgtataaatattcgtctagttaattagcaatcgagcttattttcagtcattagttacatattactgctcgtgtaactatttctgaaaatattgttcttgcacgtacgccctgcaagcagatgatcgattttacttcttggttctgaagatcgatcg

SEQ ID NO: 6631 - DNA, 863 bp, Oryza sativa
ggatttttttaatctttggatggattttgatgtataagaacccgaataaatttagaacaaggggaggcagttagggaattaaataattcaaagggaaaattcatattcactttcaaaatttcgaattgagtttgaggaatttctggaaaagttcaaagtacggatctattgtttatcaaaattttagtttgttctgttgcaacgcacatgcattttttctagttagtatttaaaacgtagcaatttcgagaatcaatccacacctattaagtaagtactccctccattcctaaatatttacgacgttgacttttttaaaaatgtttgaccattcgttttatttaaaaaattaagtaagtattaattcttttcctatcatttgattcattgttaaatatatttttatgtatacatatagttttacatatttcataaaagtttttgaacaagacaaacggtcaaacatgtttaaaaaagtcaataacgttaaatatttagggacggagggagtataaagttgaagctatatgagactgcgtttaggagtagctcaatgactcgatccaactctgtaaaccgttgagagtccgtaccggtccatgtacgaagatgaaaccgagtcggcaccgatacgctacgcgcgcacggccaccggcacactgtcattaacacgtctcacactctaccctgaccgtccgatcagatcaaccaacggcccagatcacgccgctgacgtgtactccctccgattggtcggcagcggcacacatcagatcggagtcgggctcggcctcggccgccgcacgctgtatatatatcgcgacgctcgtatcgacacaaaaccaaaagcgaagacgacgatc

SEQ ID NO: 6632 - DNA, 2000 bp, Oryza sativa
cagcatccaatgagggaataaagagagtgagagagcacaaagaggagagagggagctgtaggtctgagaacagccccaaggtgaaacttttgtaaatttacctagtccaaatacgaaaatgtagatatacccctggtccaagctgaaagagtggtaaaaatagtgacccaatatgcagtttactctaaaaatatttagttcattaatagagtagtttagaaatcttattgtctctaccattgtaggagaatagtctatagtaacattaattaatatagagagcttatattagactctacatttatacatgcccttaagcatacaatccattgagccatcggacggacccctcttgtgtgtgctcgtgctactattgtgcggttggaagaacgagacgtggatttgattttctgttgtggaagatacgtatcaaccatatacaggccggcgggcgatcgatgttgataggcaggtatagtagaaagtttaagtatagagacgtgtcataaatgaatgcatgagagatgcatcaagcagtctgatgtatgctatattttcttaaccagatactcatcttagacatgattgcatactaatacaccaaatgatatatgttttttttcttcttatagatttttcttttaaattatttatccgatttataatccgattacaccattgtattcattgcaattaaatctttacaataagatcttacatgactatattttgataaaaaaatatatatgttgtaaattacttttattatatatgtaagttacttttatcatatatataaattacttttcgatttgattaaattacttattatacaatcataatgttgtgagttgtttattttattatctttttttagtcaattccatattttgtactgattaaatttaatttttagattgactcacgtttttacctccataatggaactacttttaatgtcatgacaaagttacttcctttttgtcttaagttacttctataatatatgtaaattacttttaagttttactgaaattacttttatatgtctaaaaagtaatttagtgaaatctaaaagtaatttagatatactataaaagtaatttgtaatttttcatcaaaatataatcatgtgagatcttgttgtaaagatttaattcttacaaacacaaccgcgtgtaatcggatcataaatcggatgaatagtttaaaagaaaattttatttaaaacataggtgatagaaatatattttatacttacttgatggggactagtactacagttaayatctaggtaggtctctcgttagcactaaaacgagaggccttttgatttagattttgccatactataatacgtccgtcctatagttttgtggagtatagattgtttctgtatgtaatgtaattttctgagggccaaattaagttaattaaggaagtaagaagaagaaataccaataaagagcgagatcgataatatatagaagtcgttgattaatttgagggaattatatatggatcggtcgtcgcccccaaaacgtacgtgtccacatgttgcacgcgacgtgttacgtgcacgttctaaaacgatcaattaattaattgattatccgcgcgcgcgcgggcgggttcaacgaaggattgtagattattataattactctgtttcaaattcgttgttcaatcctcggctcggccgtggctgctagctgcctgcctttaaatccttccttccttccttggtagcacttctgccctctacagctgcatctgctaattaagttgctaagccaggtgcaggtccaggtggtgccgtggtggtagtagcagtagtagccagggcaggaatatctatcgatcgatgagcagcagcagcggcggcgatgggggtgggtacaattactcggaggattgggtggtgaattcgcgagggatgcggctcttcacctgcgcgtggattcccaaggagagcagtagaggcgtggtttgcctgtgcc

SEQ ID NO: 6633 - DNA, 2000 bp, Oryza sativa
cgatgaattctgttcggaaattttggattgcctttcccatattttgctcatcgtagctcgttcctccctcatatcatcctgctaagttcctccaattgttcctaccgtgtactggaacgacaacccacccattttcggaacgaagttccgcctagttccagttcctcgatccggagcgaggaacttagctaagttccacgttccctgtgacttagactcccataactcacaaaaatgtaatgaaaatgaatgtcatgtttgatcatttgagattggaaaaaggtgaaaatgaaaataaagtgaaaagggtaattgtttgggtttggaaaaagaaactctgtatgtcatactgtcatgtagtgattgtttcaagattttaacacaaaacaaggtgaaggaagtaaagtaccttggagcatttttcagcacttcaaattcttgttctgttggcaatggccggccaaaaacatcttttggcctgtttttcttatctggacctgcgtgggtcttgtcaagttccttatcaggcctgtattttttttttaaaaaaaaagttaaagaaaatatagagaagtgatatgagcagaagtaatagggttggtaaaagcttgataaatgtgaaataattcatgaatcacggcagggaaaaaaatgctacattacattgaagaggtgcttgcagcagcagcactttgggttgcatcaccttcaccagacctcctcttctcatcttcaatttcagctgcttttgcactctctgcgttgtagccaggtgggcggacatacatgaaactcacagctttcattatctccatctgaacttgagaaacagattggatatcgacaaccgtgaatttttcatgggtgacaaaagaagcatgaagacttagataaaagcatacttgttcatcacagcttaacataaaagctcctataaaggatatatgcaacaaacatataaacctcttgtatgcaactagcaatcatcataactagatttctcagtattaaataggtttgaggtccatggtccaagtgcagataaatctttcctcatttctactgtaacttactgacttatgtcccatgctgatacatgtaacaaacatatatttgactttgagggcacaaaagtggggctgcacagtcactggcacgtattatcatcatccatggagcaaatatgacaatgaatagaaagaaatcctacagaaacccatgtcaaacatttaggtaatgtctataagcaatgctaagttgctaacactacttgtcaatggccatatcggatcaaaagcacaagcagattaagctatgatcaaagcagatgatttaggagacacatatacagcaacatagttagctaagaaggtaattagcatatacatagggttccggttccattataccttctccttgtccttcttggagaagagggcggtctggcggaagaactcctgctcctgcgcgaactcacgctgcacctcctcctggcggcgcgcgcggttggcgtggatctgctcggcgatccacttccgccgctggttcgggtaggagagcgggtgccatggcttctggttcaggtacgagtggctccacgccgtccccgccttctccttcagctccaccthccccgccgccatcttcttccctccccccaacccccctcgactccccgtcacctcctcctccatctccggccgcctcccccaatctcgccgctcccgattcgccgccgctcgaactcgattccaccctcctcgctgctcgcaaagcggattctgattctcctcccagccgaggagatgggtttcatgggcttcgtttgatgggccgattcggcggtatgggtcggcccatttaagaggcccgcttcatttccgcgagacctagaaggctagaacactaccagttgagttgactggttcactctctccccatttgtaggctggcggcgcgagacaccgccgcgttggcgcgccgctcacctcgacgccgag

SEQ ID NO: 6634 - DNA, 2000 bp, Oryza sativa
  misc_feature (1)...(2000): n = A,T,C or G
ctgattcgtcattttctggtgctgaggtggaagctagaaaaagcaagcaaaaatcaaagcacaagaagaaacacctgccagagtctttgtctgattcaaaagttgaagttggtagagatacaagaagacatcaaaagagagagcataggaagaagaaaagaaatatcactgagtcagagtcttcatctgattcagaagttgatatagatacaaggaaacatccgaagagggagcacaggaagaagaaaagagatgtcactgagtcatattcttcatctgattcagaagttgaagttgatagagatacaaggaggcatccgaagagagagcataggaaggagaaaagaaatatgactgaaaatgggcatcaagccgatcgagggagaagcaccactacagtgacactagtacttcggacaatgagaagcacntcaatgggacataaggatgagcaatactacagcgattcaagttcttctaggagcaatcggcattcaagaaggtcaagggaaaagaggtactacagtgactcaagttctcctgagcacaataggcattcagggagatcaaaggagaagagggcctatactgacttgagcacgcatgacagggataggcattcaaagagatcgagggataagcgggattacactgaatcagggccttatgagagcaataagcattcaaggacattgaaggtgaactggcactactctgattcaagtgcttctgattattcaaactccgaacggcactatagtcatcgccatcgtagaagaaaatgagcagtgttgtataatctgcatgatgtctccacagaagatcgctctgccgtttatatgatgtcattagctacatatgcttggtcattttcttaaggccaccagggtccacgggttgctggtgtttggtgactgcagctgctaatcgacttgtgatgcgatagtaatgtatgtgactgaattttgtcttctgtagaagaattgttgtgccttttgttgtaggcttgtacccgagggacttttattaatttaaaaaatatcttgtttggcatcatggtatcttttgaattcactgaataaaggccctcatttgtaatggaggtccttacgaatttgttgctcttttatgcctggataaatataatgctcaactgagcatgatttgtaatggaggtccttacgaatttgttactcttttatgcctagtatctgtaccaattaccaaatagacatatccaagacattgagtttcaggtttttgccctttttttgctaacatcgttgatgttttccaagagctaaaagagcctttcagcaaaataaattcaactctgtgtttcattttccaaaattgcagtcgactgaaaaacaaaaaagaaactctgcaatttgacaactgtcaaatgaaacgctaagcgaacatggacaccacttcacctcaaagctgaacaaggcttattcctgttaggaaaaaaaagaacttattcttccaccaacgtccattgaaaaagttatcaacttgctcaaatcaagtcaacaagtaagctcaaatcaccttgctttcccctgcaaacagtgtttaaaatgctcaaccgaatagttctccaaccgctgacctgttgctctcttgtagcttagtctctattaatctggctatcaccactgacctgctgctctcttgcattagtttactctctctttaatctggctatcagcattagagtactgactcctactactactctactactagttagcagccatgatccatcccaacgaataacaccgttctgtcctccagttgatcaatttactaatcacctcatcagttagcccacaaaattaattaattgactgactaatcaccatcatttagctcacttaattactagtaattgggatttaggatttcccccaaagcccacaactccagagcaaggtaggcagcaaagtgagccaagcccaacccccgaagcatccaacgcgagaggcggcgag

SEQ ID NO: 6635 - DNA, 254 bp, Oryza sativa
tacttcttcccatcaccaccaccaccaccatcgctttcttcctcctcgccttctgcttctgcatccatccatccatccattactcgccgaagacttcgcgcggggagagaggaggcaagcttggtcgcgggaacgcgggaagaaaggtccgagcttggaaggagaagaagaagtagccaagaacgcgagagcttggaaggcgagctgcggtggtgtagctagccaatgccggcggggaactggtagggaggggg

SEQ ID NO: 6636 - DNA, 2000 bp, Oryza sativa
acaaggccctctacggcttgcggcaggcaccgagggcgtggaatgccaagttggattccacgctcaaggggatgggcttcgagcaaagcccgcacgaggcggccatctaccggcggggcaatggaggaaatgccttgctggtgggtgtctacgtcgacgacttrgtgatcaccggcaccaaggatgcrgaggtcgcggcgttcaaggaggagatgaaggccaccttccagatgagtgatctggggcctctctccttctacctggggatcgaagtgcaccaggacaactccgggatcacgcttcgacagaccgcctacgccaagcgcgtcgttgagctggctgggctcaccgattgcaacccagctctcactccgatggaggagagactgaagctgagccgcgacagcacrgcggaggaggtggatgctacacagtaccgacgtcttgtggggagccttcgctacctcacccacacacggccggacttggccttctccgtcggctacgtcagtcggttcatgcagcgaccgacgacggagcaccagcaggctgtgaagaggatcatccgctacgttgcggggactctcgaccacggtctctactacccgaggtgtcctggcaaggcacacttcgtcgggtacagcgacagcgaccacgccggcgacatcgacaccagcaagagcacgagcgggattctcttcttcctcggcgagtgcctcgttagctggcagtcrrtcaagcagcaggtggtggccctgtccagctgcgaggccgagtacatggcggcatccgccgcttcgacccaggcgctctggcttgctcgactgcttagtgatctcctcggcagagatactggagcggtggagctcagggtggatagcaagtccgctctggccctggcaaagaaccccgtttttcacgaacggagcaagcacatccgggtgaggtaccatttcatccgaagctacttggaggaagggagcatcaaggcgagctacatcaacaccaaggaccagcttgcggatttgctcaccaaacccccttggggaggatcaagttccttgagctttgctcccggatcgggatggctcaactttcccacaagacggcgcacaagacttagggggagaatgtaggaataagtcttggctggttggtcttggtcttgtggtgcctttttcctgcttttcagctttctaggacagcatctttttctaggacagcatctctactttcagtttgagatgctctaggacagtttgttgggatgctatgctctaggacagtttgttgggatgctctaggacagcaccctcttagactagcatggctgcatggctgctacaagcagctataaatatgtatccaatcctctttgggaggatatggctttggtgttttgtgaatgaagaaaaccagaaaattgccccatctcgagtgccatcctcttctcaatgagaataaccattgaaattctaacattctttatctgtgttggtgatcttgttgagcaggatttcatggtcttgttgttgcaaagggaagttttatgcagcatgaaaggtaccaatttcactcatccattcctgatgtcaattaactgcaaaactgtagcgcagagcacatcaaaacgatacgattaaaattttcttcacctgctgcaatgcatgggcattttgctagctgaaaaaaagaagaagcaagctagtatgtttcttggagacaaaaagatcacacgagcagataggaatcttgcaggtgtgagccatccaccaattagatgacgaaggtgcagagatcacgagagatatggatatcaatctgttgaaagtacaaccttgccaacgtgaacaaggtaatgtccttctattacttgcgcataaaataatataaatataccaagttgggtatataatagttggaagattaggtggatccagctgatggaaatatatatactgagatagttctctgctccttgctccgagcaagtgaacagc

SEQ ID NO: 6637 - DNA, 2000 bp, Oryza sativa
ggataagctattaaattaactatagatgaattgaaactagcagttggctatactattaaacttgctctaatggaaaggggcaagcaaaggatcagaccaatgaggcatatgctttttctttacaatgatagatgccacctttaatagctcaacccaaaatattaaagtattcctctgactatatccgatactaccttatctaaaagccgtcatttgtgtcgtttacagttgattataagtaaaataatctaaagataaaatttctatatatattccctctgagttaataatacttgtcgttttgaacaatagtacggtctcaaaaaaacaactttgatcattattttatttataatatgtactccctccatcataaaatatttgacgccgttgacttttttaaaaatatttgaccgttcgtcttattcaaaaagtaattattaattctttcatatcatttgatttattgttaaatataattttacgtatacatataatttttacatatttcataaaagtttttgaataagatgaacggtcaaacaagtttaaaaaagttaacggcgtcaaacatttagggaaagagggagtataaaagtgctaacaaatatatgattttattaaattattttttaagactaatctatacatatagttacaatatttaaaagataaatatttaaaaaatgattcataatcaaagattctaaagtttgacctcatccttatctaaaatgaaaatattacaaacccggatggagtacgtttttagtgatctaaaggtcaatgtaagaaataaagcatgatgaaagataacaataatcaacctttaatgggtgaaaattctaatatttcaaattttgtttgcggcctggtacattgattgaagagcaaacagcaaagagtttgcaactgattcctgtacgattaaattccctgcccgctattagagattatgcaactgccggacggtgacgtacaaagagaacgattctctcctttaaatttgacattgagcaacaaaattaaatatcttgatcgtagatgtacctgaagagaagcaaagccttggagaggttgagccgttgaacagctcgtctacacgtcatgggaatagaaaaataattttccgaataacataagcccaggtttacgtgcactaagcctgcagcctggctaaatctctgcgtaacataagctttaatactactccatttgcagcttgattaattgaagcttagcttgccgctgccatttaatatgccgtcaccgatgctgatgatgcggatctctggcgaaagattttcacacacatctctgtaccaaaccaaagcatcaattctttttgttctgaattggctcattttttttaaccgcaaaaaaggagaagaaaatagtaattcgtattttttccctttttttttggctaaaagaaacactctatctctgattcgctgataaaaaaaggggagagctcgtgccgttgtgcgtgtgtagcatttgtgttgacgacgacgaggtcggccgggggcgacgaacgggtcaatccgagccgtccaatccccgcacgcgtctttacttcgccttcgtctttcctctttcctttcacgagccgcgcggcgcacagagcgtttgctgcaccttctttttctctctctctctctctctctttctcatccgcgcgcgcgtgacacgggccacgcgcacccagccggtcgctgcgggggttgggccmactcccgatccgggccccacctgttcaggcacgtgtgggcccaacccctccacgagcacacccataaataagggaaacgccgcgccggccgcttcccctcctcctcgttcgtctcctctcttctccattttttttctctcctctgcttttgaaggaactcgagaagcatcagccgcatctctactactactactactacccttgctctgtctgatccaagtccaggcagcagctagctagcgtggtggtggtggagtcgacgggg

SEQ ID NO: 6638 - DNA, 2000 bp, Oryza sativa
cataaaccacaaaaaccagacatccttcactctcaactttttcaaaaaaaaatcaatataaaagttgcttcaaaaatcatattcatccatgtttttaagttttttaagctaatactccgtttgttttatactataagtcattttgactatttttagtcaaactttcttaaatttaaccaaatttataaaataaatatagcaacatatatggcaccaaattagtataattaaaactatcatttaatatattatatttttgttttgtattgaaaatattactatattttctataaacttaattatttatttaaaaaaactagaaaaaaagacaagacgacttataatatgaaacatagtgagtatttaatcgttcacgtgctgatccatcatttcgttttacgtactaggggaacctttgaaaagaacctagctttgagtcaaggagactagtggtgactagacgtacatacggtcacgacctcttgaggccactatgaaccaatggcactcccaaatcccaaatagtccatacacaaataaggcttatttataaggagtggttggtaaaatttcttaccttggggatatctgaggctccatattcttgggcactctgagatttattttccgattggctctagtgcttaacgatgatgaagaaggtgagatagaattgctcttctctaactagataattggactaattgttgctttgttgtagcggtaggagatgacgttgtaascagattagtggctcgtggaggargatgatgtggggaaggcgaatcacgagcgagacaagtgtcaatgaggtggtgaatacatgatgaaaagatggacgctgttgcggcgacaatggcaattggagtgtarggttggtgatgtgaagtgcggaatatatacatgagagttgatggtgcsattatagataacatgtcccattattggcagtgagtaaatgttgcctctaggatgcattcacacatgtaagcctacccacgtgtacaacatttattgtaaagatttcatcgattatctttttaaaaataattttatctgtttgcaagctagcctaatatgttgcgcgagagattatggtacatatgaaccattcaatgccccgctgctcgctgttgtccgtctgcaagtgcaacggtaagaatggtggttggatttggtggcaaggagttccgtgttaccggggctaaaggggtagcggcgaggatggtggatccatccaaggcggccacacgaagaatagcgaggatggcgaattcaattgggggcaggggtcgaggaagaggtggagatggaggcggtggcagttggtgaggttgagaggaaaaagtatagcaaaggggggaatcgatggcggtggcagtcgatcagatctagtgacaaagaacccgtagcaaccgaatccaagccaaatatagccgaacagtggagagacaacgataacggacgtacggtgatgtgatggatatgtgaacgtggcgactgaatccaagtcagatctagccagacagtgaagagacaatgataatgggtgtacggtgataaatatgtgacggcggtcaccgagcgctgatgatgataactatagtaatcaagctaggctcaacccccgctcgcctcctgcacaagctcgtccccacgaccgtggttagtgtggtatcctcatcttggagactgcctccgtccaccgccggactcaccagcacacgaatgcacgagtcccacatgccgaaatcaagcctcgcgcgaagacgaccgtgccaacctagtgcgtgcgcgggccccacacctcccacctctccgcagttgcgcgcatctttcctcccccctattccctttcctcgcctaattattttttcccatttcgctcacctgttcccctcctccgccctctccccaactcgccattttccccgtcttccacagtgacaaccaccaccccacgctttccccttcctcctcgcgatccagcagcgggagag

SEQ ID NO: 6639 - DNA, 1593 bp, Oryza sativa
gattgatatttgatcaagcgaaatgtaaaagatttgagcgccaatacatgcgttcaagtataatggaatatatttgaaaggaagagagttagatagttaactttttgttggtttgtctgatcaattagagaacaaggggcaaccattactaagataaagtgaacttctggagaggaagcaagatttttcgctgggccagcggaagccgacgaaattgtattaaaatgagagaaaagattatcagttacaacaataacggttcttgacggagaaggctaacgctcccctagggagcagagagtcgggccatcgccaagcccagagcggagactgagctaagtaccacagggaagaagacccacaacatagctatacacatgccactgccaagtctaataccacaggaggactatacagactcgatcctagcacctaaaccagcatctctccaagtccaccactcctctgtcatggcttctgccacctcggttgctgtcmttggaagttggaagacgccttcgaagaccctcccatttctttctttccaaatcagccaatagaagaggaagagtctagcgtcaaacaccttcttcccttgtttgttatgaagctcgtgttcatgcagccaccaggaaaccataccgggggatatttggtgtttgcggctgaaggcggaggcggagtcgcagttgcgcccaaacctgtttggagaaagggcaattgacaaacaggtggttcccggtttctggcccagacgaacagagagggcaggaaggccacctgcgtttgtccaaattgtcggaggtcaagcagctgccccgagccgtcaggtacatgaacattttacagcgaggagtgaccttagccccccagactacytccacccataccaccttatgttttccccatgaaaaacatggagtaagctgaggaggagtagtagtttccgtcggccgaaagcttccacacaaagctgtccctggaatccggctgtagctgaattgcctcaagccgatcccacaagtgcagcgcctgcatcgaaagggcccccttgatgtcatggacggacggacccaaccgtgtgagaggaagctaagatgttaggggtctaatcgtgacggtgacggaaatggacatcctgatatacaattacwkactghttttcttcttttacaatcaactgattttctttcttttacaatcaactgattttctttccaagaaaatatttatgatttaaacttgttatgtaaggagagttggagacagatagaatcatcgtgtttcacgctgggcaccaagaatcagttcttctgatcaatcaaaatcaataaagctagcgcactaggattacacacgtgaatccacagtgaaacctttgcaacacggccccgtctaaaagctgtttattacagtaaatacaattaatacggattgagtattgtactgtgctaatgggtggacactgtgattagggactgaattatgcagagtaaactctacgttagtaatccattaattcccctctccctttaaaacctgccccttgcattctgttgatgagcacctgcgcctcaccttgtctagttagca

SEQ ID NO: 6640 - DNA, 2000 bp, Oryza sativa
  misc_feature (1)...(2000): n = A,T,C or G
gtcattmaactacgacgccgccggcaamatcgtcgcgccgtccggccgcccncgcgccgccgtgccggcggcgctaggctggtgaagagatggatacaggcagtacgacatgcccgtggcgacatgaagataatttgcagagagtgacacgcgtrcgtcgtgtagatttttatttcttccatcctattttgtgaaggatatttrgatgaatgaaatgaaataagcaattcggatgctaaatttgcaacctggaatttatgctcttgattcatatgggatcaacgtgccaatgtgaaaagtacgcctggaagacaaatgaggttgtgtttggttggttccytttccaactcatgcatgcttttcaaasggctaaataaatttttttattaaagttgttttaaaaaattatattaatctatttttcgaaaaaagctaattcttaaatcacttacttacgagaccggctttcccgtgtgggtgggcggcccgcacgaatccaacggtctgcgaaaatcgcgatttttgcgtgcaggtgcttatgttgcccgcacggaaaaacaaaaatccggaaatttttttttcaaaaaaacgaatccggtggcggcgccatcgcctcttcctcctcctcgtcatcgtcgtcctcctcattgtcttcctcattgtcagcggcggctgaggacgccgctcccgctctcatcatcggcggcggcggcctctgcgccgccggccgacggattcgccctcccgccgacctccgcgctcccttcctgccgcaccgccgccaacgccctcccctctgctggatctggggagggaaggaaggggaggggaggggaccgggatcccgcggggaagggcagctggccgctggatccttgtggggcttggccacaacccgccagatcccgcgtgccgtcgccaagccgccgccactaccgtcgtcgggragggaaggaaggggaggggaggaraccaaaggccaggaccgaaattggagaccgtaatagaggagatgagaaaaagaggagagaaaaaaaagtgggtaggggggaaagaaagggtgggtatttttccgagtagttctcttaataggtcggtacgtgaaaatatgctgtccaaagaccacacggaaaaatcgatttttccatgtggtcctcttaaatggaccgcacgtaaaaataggtcatattttcctaaacgcgaccagttctgcaatgaaaaatcttttgtatagtagtgaattaatcatgtgctaatgagtttctccgttttgtgtacacgggagattagttcccaactgcagcaaacgaactcagccacaaattatttgatcgaacattgaaaaaaataattttggcaaaacttttataccagtattcttcattgtttaaatgtgtgaggttaaaaacataaaattaaaaacaataaattaattttgaaatttaaaatcaataatggtttacaaatcacatctcacacaggcctagccaataatgtctttcaaatcacattctcaagtcctcacacattcaatgctgtagatagatagctatgccaaaaccatctttattcccccaaataaaaaaagcaaatacccacccaacaatgagaccgcgtattaattccaggtcacccaaatttgcaacacatttcctctttctttcataccaaggaaaaaaaaactcgtgatcgtcatttcccctttgactcgcgacgactgatgacgagttgacgacgacccacttgcggccactttccttcactcccaagggcaaaaccgtcattacggtgaggcaaagcttgcccccgtattaacgttgccgcctctctccgagggcaaaaccgtcatttcgctgaggcaaagcttttcccccgtattaacgttgccgcctcgctccactcacactcaggccggtttgagagtgtagcgtctgcgtctcttctcttgttgcttcggcttctccgaggttggaggaggcgagctgcgagctgcgagcgcc

SEQ ID NO: 6641 - DNA, 2000 bp, Oryza sativa
attgctcatgttttaaatattgtttatcattacaccaatagaaattatacaccaataaaaattaattacatgcaacacattcaatcatcatattactgtttacacaaacaaacgaaattcttatagataataattattttgagaagacctacaaatcttatgagacgatcaaaatggatggggaagagtagtttgcgactcgggagcagtagtattttccatttataaagaagacttgaccggcagctgggagaggaaggaagaagacaatgcagatagagttggcacgaactccaacccccacaatgttccatcaacactcctgtctccactctccaccaccctcaaatccccaaaaccccatagtagggtccaaaacgcaaaaaaaccccatccaccccttaccacctgccctaaactgccaaatccccaaaacccagggtgcaacacgcaaaaccgcaacccccttcgcatttcgaaaaaagaaggccaccggccaccccaccaccacctccaccacgacgcacgcttcgagcgccgcttcgcctctccccgctccactctctctctctctccacagcgtttgtttttgctcgcgagaaaaaccctgcggaaaatcgaaaaatctcgcctcccctcttcgtcccctcccctcccctccccactcgccgccgaagcttccggtttttgttcctcctcctcgaaccctcgggagagatcgcgtggtgagcccgctcgaatcttttggtatatctttgttcccgttctttccatccatccctgcttttttcttggccgctttccgtgtaatgccggtgccatttccgcctctttggttttccccgatctgtggtttcggtcttgcccggtagagattcgggaacgggaagcgcggcggcggttgcgtgacggtttcttgagggttcttgagaggtcttggttcggttcgtgcttttatctttggtggggtgtgagtccgtgcgtgcgtggatgtttttcttttgcttttgcgaaagtgaaagtgtgcttgcgaaaagggggtaaagcgacgagcttgctgtgtgcgcgcatatgtagctgctggtttcttgcgaatggttggggtggggggattttttkgctcgattcctggttttcttgccgggttcagatctgatcttttttctgctctctcttgtgtgttttttcgagttgtttgtggttgctcacctcttgtgcaccggcaatggcaggcttgagcagcgtttcttgctcggcggcggcggcggcggcggcggttgctagatctccggcgtgacaccggtcggaatgggctggatgtcgacggggacgacgttcgggcgttgatggcaggtgaatccctggacgaatgtttttgcatttggtttggtctccctctccagatgtagatggggggtatatatgttgtcttgagttttctattactatattggagcatggtcaatagggagaacatgcttgttcttgccgcctgcgctggaaatgttaatgcttctctgtcctttcgagattattattattctttaaagtcgcctactttgcagtgcaagaactcatttttcacctcttggtttagtgatttacttccctcagtggggaacggcaaccgtcctttgttactttgagctagtaaatgcgcgagatttacctggtttgtccatgattgctccaggtgtggtgttcccatgattgatgatgtggagatactgggatggttcgagatgaagaaaatgcttgtgaggtgctctgttgagagaaaccttattacctgatgacttgttaattcgaaggtgccaggttcttcctgttcattttgatatcgttcatcatttttgtttccgacaaccagccattttaaaacttgttcttatttatgatgttgcagttattctagcacaccagttgctgctggttggatctttttctttcattgctgagtaggagcgtaggagttggttggttcaagaatttcgttcaag

SEQ ID NO: 6642 - DNA, 2000 bp, Oryza sativa
gattgtaaaaaatatatattgataattaattagtaattcccgtatcaaagcgcgggaaatcatacattggaaaagactatacaattgtatattgtagagtgatatacctgacgcaagcggtatcgcaagtgttaaaatattgatttaacaattactatccaatagacatttcgatataatcgatgacacactttggttgtgtttagttctttggtcaaaatttttttaaagtatacggacaaatatttgaaatattaaacacatgctaatagcacaacaaattacatattccacctgtaaactgcgagacgaatttattaagcctaattaatccgtcattagcaaatgtttactgtagcatcacattgtcgagtcatggcgtaattaggcttaaaagattcatctcgtaattttacatgtaaactgtgcaattggttttttcgttcacatttaatgctttatgtatatgtttaaacattttttggagatttttggagatttgaagggaactaaacacggycttttataacgtggtttgatgtgagctcaacagcaattattacaggccttttataacgtggtttgatgtgagctcaacagcaattattacagtgagtggggttgcaaacttgcaatagaggatattgatgattgatcggtcaacaagcagattggctttaagttctcaacgatttctccttctttcactacccttttgttaattccgtgctcactatatataaaagaactgaatcaaccagtattaaatattctaataacttgagcaaatgaagaatcgccatataattagtcagctcaaatcaatggtcagactaattcgatagaggaaaatcacttgtaatgtctctaaaattttagcctaattttttttatgtctctgtattttgtttatttccttgtatactcctaaaattttattttaaccccttccatgtcccttccatcagttgaccgttagttaaccatctaatttatataaaaatgaccattttactctttggatgaacataaaaaattatgagttatattattaaaaatataaaagtttttcacataagactattaataataatgactattaataataatgagtttgttgtgctatacattatttacgaaaaaattatttttagataataaaataaaatactatgtattttttaatgttttaaaaagttataaaaacgaggagcacacatacaaagataggactaccaatgttcacaacattgttcttaagaatgctccggataaataaaatctattgccattttaaatttcaaatagaaaatttaatcttacatttgttttattttcaaaatttatgtcaaaatttatttagtctcattatttacataaaatgcacatactgtgcactcaaacaaaattttaaattgtttttcaagcttatatttaaacctaaaccatcaagagtattaaagacatttgccaccaaagtgtaatgaacgaaaatgtaacggtatgggcatggaagaaatcaatttgaaatttcagtagtatagaagggatcgaataaattttaaggatataaaaggcattgagttgttatcaagcgtatacaggaatttactcaattcattaacacttcgtacaagcaaccgaccattgtataacctgcttgataaaccgtgcaaatcaactaattgtactttttatttaacgacctggttaggtaaccaaatgatcatgcttgagctactatttgctatatatcaacaccaatcacctgccatcatagagtggcaagctggcattagataaacattttcattgacttgtctcaaaacgtgcttaattatgttaattataattaaccatgtacatcacatgaactatactaaaatgtttgatccgatctctatcacacaatgcacaaattataattgatcctcttgcacattgttgcagatataaatgcactccatttcgtcttgttgattcttgcagattgtcgcaag

SEQ ID NO: 6643 - DNA, 2000 bp, Oryza sativa
cttcacactgggtggtggtgctgtttcatgagatcttgcaaacagaccattttgacgaggtcaactatggaagcagagctgacggcactggatactgctactgttgaggcagaatggctgcatgatctattaatggatctgcctattgttgaaaaaccggtgccggctatccttatgaactgtgacaatcaaacggtaattgtcaaagtgaatagttcgaaggataatatgaaatcgtctagacatgtgaaaagacgattgaagtytgtcaggaaattaagaaactctggagttataacgttggattacatccaaacagctagaaacctggcagatcccttcacgaagggactatcacgaaatgtgatagacaatgcatcgaaggagatgggtttgagacccatgtgagttatactatggtggtaacccagtctatgtgatcggagatcccgtgaattagatctgggaagaacaaaccatagtaaatgagagagwryayatmtataccctctctaagtgaagatgcatgtactctcgtgagctgcaaggcaggttgactatgccttaatgagttctgttggctttaattagcgaagatgctgtcctgcagagcattcttgaaagaactcacctttgtgagcttgactgttggtcgcagtctatgagattttgggtgaatcttctaggaagcttactaaagacctaggagtatgacttatacgctccacccgaggggtagtctacagacggtctagtaccagataagactctgagtgaaacttgcttgcacaagacttgcaattcaaggcgtagtccattgttcaagttgtgagtaagtgtagcttggagttctaggtggatgttcaaccttaattggtctccatcgaaccgctggtatataaacagtacattggaaaaggcaaatctcagtaggattttgagatttggtgggggattgttggaattaatgaatgggccttagcccactcgaagattaattctttggaaaatcacaaaagcccacctcatgggatggcatgcatgtggagtttagtaccaccttgcttattctaggagagggggacctccttaaaagggaggatgtcctcctagccacttgaagcatgtgtggtggagagaagaggggaaacacacgcgcgcgctcgctcgcctcgcctggcagggcagggcagggcaggcggcgcgcgtgcacgacgtacgcgtcgaatggtccgaaaaattggctcctcacccttgcgcagatgcagcctccttttgcagttttgttttgctgcaaattcggattcgtttttgtgttggaaacgttccgaaaaatccggtgcgtgcaaacggcgtggagtccggataagttacgtgcgacttatccggttcggttacgcgcagtagagatcgtgcgggcgccctgatcaagcgacccttctctatataaaccgacccgccgtcttcacgcacatacacgcgaaatcaatctagggtttgcctcctactctgtactrcgccgtcgctcgtagactactccatcccgctcgcyggcgtgcacctgcgatcgggagagcaggtctccgaaacctctgccttcgacgtcctgcaccgggagaaggcgrcaataaggtttttgggaagcgctttgcrcgactgctccctgttcgtccgcgacggctcgtcttcctcttcgctcgcgcgytgcgtgccttcgtagacgcctgcgaaaagtttcgaccgagcagccggtctttccgccacctcggtacgtgttcaatatgttgcgcagtttgatctgttcatgttatactgtgtagtttacatgtgtagatctaatgatgcgttcatgctatttttcatctgtaatgtcatgatttatttatggaatagattaaatcattatatgtctataatctcaacagggctgtgcatgccttcaagccggtacggcatggcccgattattggtaaaccgtgtttaggcctgaggtgcagccc

SEQ ID NO: 6644 - DNA, 22 bp, Oryza sativa
gsttkttgcgggttaactggta

SEQ ID NO: 6645 - DNA, 2000 bp, Oryza sativa
tgacgttcttaattaacccagctggtattacctgtgtgtcagtgtgtcttctggtgaaactgaatgaatcgatctgttaaatagaatttgctgttcagatctagatttcctttctctgcacaaccaatttagccactgggcccgctacaatttcatgggcctaaaactatgcctatggtaaaaatatggtgtacttttacagaaagtgcatctctcactcaattatatgttaatcacatagggacaaacaaatttccacttggaataaaaaaaatactgtgtggtccaatatctacattatatcacctgaacccctaggtaacctccatctaatacgtgttcgaaaaccatcatgcatgttcacttccacatgggcttcaattcatttttattgagtgttcattgaccatacttatgttgagtgatacaggtcaagctgtcaaggatgcttagcattcttatttactagtaattgattgcacatattcttgctgctaattaatgtatccagccaaatagttcaactcctttccataaaacgtttctctagatatttttgtttaactggttagggacctacttcagtaaattggaaagctgtaattaaatctacagaataagtcatgctgttttagtgaattctcagactatccacaattccacatcacttattgccataggaagaaaatttcagataatccactgggttgatttatcactggttttaccttgtgctttctcagtgtctctgctttttattgtaaaaaaaattcctttaaaggtttaggtgatctactttgttctacatacctttcctaccaaactttaataatctgctgataaggacaacagtaatggaatccattactgcagtggsccttaataataaaattatacctgatttctagtcaattaaagtatatatctaaagtactgattgctatatttttatttttatcaagatatttacatcatcattttttggccatgcggtgtctacatactataaggttttaagccaacaaatgagatatattctgattttctctttggcagagtttgtttggaaaattttgccaaatgtttatatggatgcatttcctttgtctttaggtgcacatgtgcacatgtgctgtttgcttgcttttgtccaaaatatgatttggacttactggagtttgaattatcaattatgttaattggccacatacctatccatgtgcatgagtgcatcgctgttcctagcttttctttttcctgagtggatgctgcttctagctaggtgaattgttcacattcacacatcggcccagggcatgtgttggcccaacttgagattaggctttgccacacccctaagcccaaccttcattggacctgtaccttgcttcaaaggcttgaaaagtagcctcatcctgctagaccaagcttatagggaacagatagacacatctacacacacaaactgaccctggtaatccattaattgactccacatctaccttcatggctacaacatctgtctttcctttcatctgcatgtgcattttgtttctcaattagtttacgaagacagacatttttttccacccatcacttgtgtatctgcaatatttgctttcacttttgaaacattgtaatcacgctactttgtttctgccaaatagttaatcatgctttattgtctgtattgcagtattgcaagttgccgtgaaaggccattctagggaatgcagaaagatgtgcttgcacgccagagatatctcctatgaagagaagggcatttctcccattgatttgacatcactaattcttgatgagcgaggatttcagttgctcacctggtgcattctgcaatcacaaagtaataatgatgctatcaatgtcagaaatactgctatgctagatcatgcaatttctgatgatggttgaagtttttgcttttacggttttcctctaaaattccaataaagaattgtccgctagcattgttttgaatg

SEQ ID NO: 6646 - DNA, 2000 bp, Oryza sativa
ggcggatccgggttctcggcggcggatccggacgcaggctcaatgccgccgtcctcctccccccacgacggtgcggacaagctcgccaacggcgtggcgagcttggcggcggcgggctcgccgaatctggcgatgggggccacaacgcagtggatccggacgcggcctcgacgccgtcgtcctgctccccccacgacagcacggacgagctcgccgacggcgtggcgagcttggcggcggcaggcttgccggatccgggcacgggctcgccggatcctgcggcggggaacagcggtggcgacggatctaacgacgacaagaaagacggcgaagcggtggcggggagtagcgacaacgactgcggtggatctggcgaggcgacgacgaccacaacgagatggagatttggggtaggtgcacggggtgaccggacgaggtgacgcgcggggcttcgactcctccaacgcgaggcttcgcggctcctgagcccaggcgcgacgcttgcaccggttcctcttcaagctcgctgacagcctgcgagaccacccaatcccgtgccatctcggctcggctccgacgtagaggtttgagatcacaggccaggatcacgcgttgtgcatggtccttatgtcattcaaatgggcgatgccctagccgagttacatgttgttggtccgagtagcaaacttgtccttttctatatagtttctgcctcgatttggctataaaataatatctttaatgtcatgtaagtaaattatcagttttggagttgtgtcctgtttttttttttaatgtttaggaggaaataccacatacttaagtgtcttataggtaattttgcgataacagaaatagaagactatggtaaaataaatgtcttgtacagttgtactacagttccgtatattgacaggtttagcgtgttcgaccatactaggctctcaaaatttaggggcctaaattttagatttcaattccatgaaaggcattttaatatgtcttagaatattataatttgttttaaaagtttcactcatcttcctttatcgatctaaacaagaacatgcttttttttttttactttggtaagtatttgtgataatcatggcgatgatgtgaacacgcgtgccgaacgtaaaactatcattttttttacttagtaaagacaacaaaaccatccgtgggtattaagagcaagtacaattgtaaagatatagcttagctacaagcacatatgaaaaaggaagaaaaaaacagaccataaatttgtagtgtgagagatgagccaagtattaatgattcaatgtatagtagactattaaagtgactgtagatgatgtattaattttgaaaggtagcagtgggttacttgactatattatcaaacttgctctaacactgcggtcttcaatttataagtaattaagtacggccctggtaattctcacaatctcacctagccaatctctccacacacccttgaggccttgacgtagacccctgaatcaacccaagtggaaaaactatcaacagtccattagctgaactgaactgaaactgctaaccagtaactaacctcctcacacctcccaatctcgtccacagcatacacacgtctacgcatgacgtacgcttcgtgacgtaaggcctcatgccctatacgcgattcgtgacgtgcgctccgtgacgtcgtcttgaccggggcgggacgacgccacgcgcgcgtggcgcgtccttgtcatggcgggcgtcgacagccagctcgcgcgcgcccccgtttttcccactcaattgcgttacagttttctcccacagatccatgcaaattaaagatcacacggtctcgttctcgccgcctatatgtagcgccaccgattccccatgaaccattcaagtgtttgtacttggctttgctggcctgtttctgttttgattactcgagctccagagcacagcagcagagagacgcgagctgttcgtggtcgtcgtcgtcgtcg

SEQ ID NO: 6647 - DNA, 2000 bp, Oryza sativa
aaggggggagagaagagagaggctgccactttagtccctataaatacctttaagagatactaatagattttagtcccaatatacacttttatccctagtcacctctgtttagattcttagggactaatggattagtcccataaaccaaacatgaccatattactaaaggccaaatgaaaatactgaaaaaccacaaacatgtttatgttttcaatagataaatatgctaagaaaatagatgaaagcctcacccgatctctgactagagataatactatccctgtggacatcattattcttgttgaaggcatcggagtagtaactctttgtttttcaggtgataatctagtctggtttcaaatgggtgtttgacagtctttttgatttatcctccttagaggattcacgtagaaggtcttacttcaaaatcggggtttgtatttgctatgtctgttgcccattataggaagttggagatgcttgtttgttttctgttcagcttggcaacaatgagttgtggcgggttttagtagttgtgtcgctacttgttgttttccctttatgtgagttttcattgtttttcattgtttttttcaattaatatttgtgcagatgtaaggttcttagtcccgatttctcttataaattaggttaaaatatttttttcttcttaatataaagcatgaaatctcttctgccctctttcttgaggttatctaaaaaaaatgacaagcaacagacaaggagaaaaagtctaaatagacttgacctttttgttttcaggaatggaatgattgtagtcatagaatgtgtatgctccagaacttctaaacatagtttttattataaaatatttctatatataaattcctaaaaaactattttagatctaattttgaactttataatcgttaaataattattataaatcattcacttatttattcattcagttcgatttttcctttgttataacacggcagatgtaaacacaccactaaacacatagcaccacactcatatatccgcaaattcctctaaaaggctaaaacacactagaaaggacgaaaccaacgacacattcttaatctcattaaaattctatgaaagcccccttgcttgtgaccaatattcaggtacagaatcaatgatgtacatccacatcaccttaaccttcttagatttaccgctctaacatcccacataccggattaaagtcatcatttaaaagtgtattgcggggattgaactaaatcctgatttggtattgacacaaacatatacgaaaaagaacatattggacatcacgttgtaagctcgatgtcaatgaattaagttttctgtaaacgtcagtctgtcatctttaaagcacacagcacagtaaagatacttcctctcttttagaaaaaaggcaaatcctgactacgtatctaaagataatacatgcctaaatatatagcaaggatttgtcttttttgacgcggagttagtaagtctcgagagaaggaagaaacgtccaaaggttttccgattagctatacaaggtggtgagctagatgacctaaatttaaagcctcatctcttttaattatttgatattaggtatttctctaatattcgtgtcttttttaagtcttataatagaaggtaaaacattaattccgtagaagaaaaagtagaattttgatatcctacgaggccatgagtcacatgagtaagacgctcggtcacgtaagcacgggggcgtcagccgcgtcactgctgatgccaacttgctgtcgtagtgagcacaatcggtcaagtcaatgggggagaatgccaaaatctcctttgtgggcttaatttatatgtggatcaccattatcctcgcacaaagttcacgttttggtccccctcctgttcggcgacgggcgacgtacggcgccactataagaaacgtgccctattgctgtcacgccgtacttcctcccgcccaccgggcagctagcttagctgccgcc

SEQ ID NO: 6648 - DNA, 2000 bp, Oryza sativa
cagcggtgcgacggcggcggccgcggccccccgcgtggatccggcggcgacggcaaccccccgtgcggatctagcggcggccctccgacgatggcgacgacgacaggaaggcggtgacgacgacggaaaggcgacggcgactatgggaagacgacggcgacgacgacgggaaggcagcagatctggccacggcgactgcgacgacgaccagaaggcggcggatctggccatggcgacggcgacgatgacgggaaggcggcgacggctagggttagggttttgttttttcaatttttttttcgattttttatttttgcgtgcgggcgacataagcacccgcatgcgaaaatcagattttcgtgtgtggttgcgccgcccgcacgcacaaatagcgcttttcgcagacgaactgctccagacgggctgaagctccgcacgcgaaaatccgttcgaccgcacgggaaaatcttctgtgtatgagtggtggcacacgctcaaaatatttgtcagggataaatatactccctccatttttaaatatttgacaccgttaactttttagcacatgtttgaccgttcgtcttattcaaaaacttttgtgaaatatgtaaaactatacatatacatataagtatatttaacaatgaattcgaacggtcaaatatattttaaaaaagttaatagcgtcaaatatttagaaacggagggagtatgaacctcataaaaatttctatggaagcacagctacatttgtataaacatgatcaccgacatctattatataattaaaagaatagaaaaagagcctccacgttcgctctcatggcctagaaattctcacattaatcggagaaaaagaaaaggcagagtccatatagaaatacaatttagaaatagctgaaatttggaattaaaaaacaacatatagaaatacaatttagaaataattgaaattcggaattaaaaaataaaaaatattagaagaggagaatagagtccatatagaaatacaattaggaaataactgaaattcgaaatttaaaataaggaatattagaagtagagtatagagtccatatagaaatacaattaaaaaaaatagaaatttggaattaaaaaataaggagtattagaagtaaagtatagagtccatataggaatttaaaactaactaaaattcggaataaacataataaaattaaagtagagttttgagtccgtataaaaatacaatttacaaataactaaaattcgaaattaagaaaaacatgggaagaagagtttaaagtcaatataggaatacaatttagaagtaaatgaaattaaaaattaaaaattaaaaaatattgaaagatgagtttagagtccacatataaatacaattagaaataataaaaattcagaaataaaaataaataatattggaagaagagcctagagtctatatagaaatacaatttacagaaaattcgaaattaaaaaaaatattaaaagacgagtctagagttcatataggaatatatataatttacaaataactaaaatttgatattaaaaataattaataactaacacgtatataaaatataatatgaatattacacatttgtagtttcgtaaagttattgcaaaatttaaaattatgatgttattttaatatatttaaataatataatgagaaaacatatatgctattataagagagaaaatataacgatactagccgcgcaatctgcgtgggccaccaccatgctagttactacttattacaatagctttgtgctgttgctgtctaaagctgaccaattaattttggagcacacataaatcttgtaattaaagaattttcaggtgtttcagtgaacaagtgatcaaaaatatttcctcaatagttttccgaactaatattgtacggacaccataaatatggacttcattaccatatccacacgtaatcgaaaccgtccgcatctgacagtgaaggaaagagaacagaggcc

SEQ ID NO: 6649 - DNA, 2000 bp, Oryza sativa
taggaaggaggaagtattccgttcggtctcgaataaccgacactgttaactataaccatttcattttatacacaagttacttttgaatgattatatcataatcgacgaaaattgtatgcttatattatcgacagtggcagatcgggttggttggctactaatgacttcgtgcctgtttagatgtcaccctaaaatttttgcaccatatcacatcgaatgtttaaacacctacttgaagtattaaatataagttaaaaaaataagaattgcacagattgcgactactttgcgagacaaatcttttaagcataattgattcatgatttgacaatatgatgctacagtaaacatgtgttaatgacagattaattaggcttaataaattcgtctcgcggtttaccgacggatattgtaattagtttttttattagtgttcgaacaccccatgcgacaccctatataatactcgatgtgacacgttaaaactttacacccctgaatctaaacacctccttcatgcttgccaagagttacaaatatggaaataagtacaccatacaccccaatttggtcataatttggtcatagattttgttatctgttaagtaatatgtttcttttcattacatgcatataggtttcttagaaacaatattgagttgataaaaactaagttgctttagtcatttgatatttttactgtagccccacctcaatttatattcgagattcgccacttattatcgacgctacacacttcaaaatataaacatatttttacaaaactgtttaacaaataagcggttaaagtttataataaacttattagtagagtactcataaaagatcttatttctacctatgcaattacgaggttgagacggatgtagtatttaagaacggaatgaatacgacggcaagagctcagaaattatgtttgcttttcattttggagctgttttcttgtttcttcttttgttctttacgaggctttgtaagccgatgcacatcttctgcagcatagggtctactactacattagcagtaccgtagacaatcctcactatttacatgtaaagttttttacatactccttaatacaagtacgttttgcagggtttaaaatttttttgagcaccagacgtgacaagatgtccatttttaaataaatcgagtgtaaattaactattctttctaattggactatttgtgagtgcattccccactctttttctttctttctatttcatggcttatacgtgacggcatgtttttagtatgagtctgaatagatatatagacaacctgaccaaattacactatggaaatagtcaagtaagcataacttctttctcttaattaattgtttcctgtaggtgaagtcaatgaatttcaacgtgccaccaagtcccctaatttctcctttgaaccctccctctcttttaatttgtaccatgatttttttttggatcatctaccgtcctggctttccactacccagcaatccagcatcctttcaaacaaatgcattttcattttgttcaatttgatatatctatccctaatgctattacacaaacctactttattcaaaagtcaattcgacatgttagatcgaaattaaaaagaaaaggtctcccttgacatgaagtacaagtccgtccattctctccttccgttaaaaagccagaaaagtagtagtactccgtataagagtaggtacaatagcagcctataagtcagatacaaacatattttaatgagataaatgagaagagagaaggacagcaggctataaatttgtagccagctgtagcacggactccaagacaccgtgtttgcatgacaggtaggactaagtattaatactgtagtatataactattgtataaatgagctattagattggctgtagatgaattggagctggtcgttggctatactatttaacttgctctaatagagtgagaaaggtcgtatagctagctataaatacggcc

SEQ ID NO: 6650 - DNA, 2000 bp, Oryza sativa
caattgaattttttatactagcggtattaactaaaatttgtgctctagctgcggctatggtgctgatcattttcaagctgacgccaaacctttagatatacaagagttgaatcttttattggcacatttatatctgatcaaaacctaaattcaactaaaataccttttaaaaatattttagttttgaatggccaaattatttagtgagccgattgctcccttgaaaacgatataacataaccacattcaggaaagtaccattcgtgtgatggtagagtctttgattggcacatgacttaactcaccaagtataaattctgatgctcataaatagagctatatatatgtattgtgaaaataatcaaatgggttatgcaggagtatattacagtcctacggtctgtataggctccgatgagtacagtgcagatggaacaaacacatgaaaaaactacatattggtcctgtcttttcaagggccgtagtgcaagaacatccacagtacactatagacaattagaacatatggttcatgatgccccgtttcatattcatctgctaataatcaagggcttctcgaagaattatgcgtgctttctgattattggtcgcttgctctactgtcaacgatgacaatgcagctgcctgctatactccataatgtttttttatctggcaacaatagcgactcaccacattagtgtgcaatattaattacaatgtcgtcacttaagaggtttctttttttctccggttacacacttttctggttcttaattactaactcgatgttttgcagattaaaacaaataagtcaattacagtactgactgtccttaaccttgtaaattaataatcgcttctgtcattacaaaaaaagaagtcgttagtcgtccattacatacgaattccctcccctaactcaaaggacaaaattgaatgaaaaaaattcagccttatttaatatatctgaaagtgccttaaactacatctcaaaataacaaaaggtattcttaaccaaaaaattcagaccaaaaacacatcgaattccacaataatttgtttttaggagtgtctatacacttcaggcgactgaatttttcaaaaatttccatcactttttctaccacttggatgatgaaaatccaatggttatcattactcaccaactacttattacttatcactctcaatgattgaacaataaaccgttctaacatacaaaaatttacaaaactacatgaaaaacattaacccataaaagtgtacaaagttacatgcaaaaaattcaaattatgtaaaattaaaataaaaccaacaacaaaattgcggttaaaatacgactaaaattataattttttagccgcctgaaaactagcaaatcccttgtctttttagggggaaaaaactcctttcccctgaacagtatctcagtcaaaagaagagatatcatcgatcggctctttgatttcttggcacccttacacccaacgacatggacgtggcatgatcaccaggtagtcaggcaccagcggatggccactgttgaggtgacatgtagcttaattagctagatgcaagtacaactttgagctgctttttctcgcagacaaattaaaaggcataaaaggatagcgtatagtaacaaactatagcttagctttgtacaaattaaaaggcatgatgttgctctgaagattcgtcaagacagcaagaggattcaaaccccatcgatcgatcagtgcatgacttggaccaagctctcatgcatttataaagccatagaagaatacccttttaattgctccatggactccttcacactcatatatatatagctagctttgctccttgcaaagaaaggccaatatctcaagagagctagctagagctccatttacaaccattacaagattgcatcagagaagatatcttcatagataattgttggagcaagaacacaagaaaacacgtaggttcaattataatcgatcgtggag

SEQ ID NO: 6651 - DNA, 2000 bp, Oryza sativa
tcggcggcggcgaaggcaggccggcggtgaagacgtggacgcccatgaacggtggtgtgaccaaccaaccatataggcgagggcaccagtcggcggcgacggaggcaggccggcggtgaagtcgtagacgcccaayagcggcggcataataggcyagccgtgtaggcggrggcaccagtcggcggcgacggaggcaggccggcggtgaagtcgtagacgcccaacagcggcggcataataggccagccgtgtaggcggaggcaccactcggcggcgaacggtggtgtgaccaaccaaccgtataggcgaggacaccagtcagtggcgrcagaggcagcsagcgatacttggtaatcttgatgcgagatgcatgtgcgtagatatagtccctgccttgaaatacaagatgaatcttggtgacttgggaaattcaaccattgccttcatggtcttggtgatgatgattttgctctgtatacgcttgacgctaaattgtagagtaatctttctgggcagagcagtattgatcgatgtgcatgcatagctgtatttaggccgacggcttcctctgattggtcggctggtttcccatgcacacagaaagtaccggattggcttatgtgcttgttacatgcaattgctaatgacgctggcccatgatgattgctccaatcgattggctgcgaggacaagttgactcggatttggattaataattggatctcgtcgggagatacgataccaacaagatgccggcgccacagatgccggyggctgagaattgatacgcatccctgaatagattaaaacagatgatgactgcggtgcggccaccttcttcaatgaaactgataaacatagcggcggccggacgagatcaaggtagtcttgaaccttcccgacttgattaggtccaagtgagaaatcgagagctttccgaagtcgtcgacgaagaaaccgaagcaggagattggttgtaaagcgacgacgaatccggcaatgctgaaggttagtttccatcgcacttgtcaatgggaaactcgacgcacccctacctggcgcgccaactgtcgaaacatgaattcggcaataataaaatggggtagcgcacgagacctaaaagtggatggatgtggagacaaaggatttagacaggttcaggccctctcaatgagaggtaataccctactcctgtttggggatttgaatccgccgggtgtgtattgatctgacgatctagttgtctcatgcccctagaggggctccctgccctccttatataggacggggggcaggattacaagatagaaaccttaaccaatacggtatcggtttcctaaatctactttacaatcttatcaaaccaggactttaggccgtttcataatatacaggaaacgtaatacccaagtcatgatctgttacatattttatatatataagttatcccctataactagtcggataaccatgccgtgtgggtatggggtacccataatctccacatcctcctcctccmacctctactccggccaccggccgcctcctcccacgytccccccgccgccgccgccgccgccgccgccgccatcgccacccgcctcctccttctagcagtagtaataaaggaaggaagaaaatccaccgccctacccctatctatccgttgcctcacgtccgtttcccacattttccgcttccttcgtccatcgccatctattaacccgcccccccacgattcctgccgagaaatttctcccccccacagagagggaggcgatccctagcctcgtcctgaatctcgcggcgccgccaattcgatctgcccgcgccgtctcagggcggcgaatcttgggctggagtcggggggagagatccgggatcttccttttcttgggtgttcccgggacgcaaatcttgcggccgccgggcaatgtgactggggttcttgtggggggtgaggcgattcgcgcgcgcattcggtgctgaatcttgcgggg

SEQ ID NO: 6652 - DNA, 2000 bp, Oryza sativa
gggaaacatgaatttttatataggtacggacttctgttagccgaagccggtgttaccttgatatattagtatgtagcatacgagtacaatatttgacctaatttagtctttgcttcctcgaacatgaactcggcgcgattagatgtcgccctagatccctcttgttggcctctgtggctccctactgggtatgtctaggcttatctcagtggatattgccttgtcttgaattgtctatatctgtactggtttgaatttgtatcttccccctctccttagggggtcttgtttttataccatctagtattttcttatctaagtagaactaggaactcaagtatggatacaatccgagtagtccttgtcgtgcccaagtaggattgtgcttctctttccttattcagactaccttccatatataaggtttgattacacttattatatggtgggccctaccgagcctaacgtaaaagtattaggtatgtcttatctataacaccgacaaacatatatatccatatctatagacattccgagaaagtttccttgttattttgagcaagaaggaataaatctagctatatgtaaaaatgagagtaaaccataatttatctatttatgtttctatgatatattattaagatagcttgaacaaagctaccatattcgctctagaggctaggatttttcacattaattgaagaaaacaaaaatatttggaccaatagatcatgatgggtccaagatagattagcatagttgtgtacaaaatacagttaaaattacaattctagctataaaaacataaactaggagttggatatgaaatacctaaatctcttttaaagatcatctattgggtagaaaatagaattgtacatataatttaattgttgtatatcgtatctaattctacaccacacaatcttcgcatgacaatccccttgttaggttaatatcaactacaacttgctaaactaattttgattttggaattgaattaactagatactaaattaagagtcagttcaaattcatacatatcttgtaattccaaatattataattattaaatctacaggaaactatatttgagactctaaactattagtacaactcgatcttttacattttaactctttttttgaaaacttattttacaaatggatatctgaaaaaaaaagtattccaagaatgaagccttttggcgttgagattcaatagtgtcgacatcaatgacactggcgccgacaccctcaacccctcgtgatagctaagttgctgacacgaaggaggtcggcgccaaagagatttatgctaaggacctatttgtaaaataaattttataaaaaaggttaaaatgcaatagtttttcttacaaaatacaaatagacccttggcgctagcctctttagaattatacattaagataattagtacacaatacttttataattattaatggaaatttataattgactccaaaccaaatacaacttgtttgttctaatcctaaatgttgaaatgatttaatcaagaaaaactaaatggagagtccacgatgatgtataattttgtattcattgatcctaagttttggaatcattaattttttatttcgcaccttacaaaataatatattaattctagactaatgacaacatgcacttttaggcgacgtgtatatagctaggaaataatgggagagagtataattatactatatttagactttcccaagccagttagttgaccatgactttttctcataaagccaagctggaaaagaaagaaaataatcttttcacactagttggcaactggcacgagccgttttcttgaagcgtgctctgcacgtgtgacaagtcgctctcgatcgatcgtgggatggctgcctatatgtagagcccaacaccatgcaaaatgcaacaacaatgcatcgttcgttcgttgcaaacagcagctagtacgtgttcgatcgttgcatgcacgacgcaaac

SEQ ID NO: 6653 - DNA, 1570 bp, Oryza sativa
aataatataaaaccttgttgtgaagatttaattgtatgaacacaatggtgtaatcggattgtagattggataagtaatttgagagaaaactttgtttgaagaggaaaaagatatgggggacaaactgtagcctctctctctatgactctctctgaaccaggaattgctatgacatgtggttggagtggtttcatctcgatccttatccagaaagccacgcctgcgactgcgaggaccatgtagaaggactccatgataaggcgagcgatagcgctaaaacgagagggctctcaaattagattttacgatatttaaattgtttacaaataatattttttgttaagttcactggtacatctttccaataataaaatttatggaacataaataagatacccacgcatgtacgtgggctatctccttagttgatctaatggcaagggttagatgatgatgcgggctcacagattttaagctttacaaaagtaaatgatttgtagatgatgatgtggcctcatagattttaagctttatagtagcaaatgatttgtagtgagtaccaaattctataggaagaaaggattttttttttcacaggcagctaatgacactgagacgacatcagccatcttcgtatgcatttaaaagtccaggttacatctgcagcagatatatatcctagaacatgtgatacccttttttataccgtggcatatctctctgcatttaatctcggacgatcatgaacacatcaccaggggcttaacacgccacggtcatgagttgatccatatattgtttattgggtgcttgattctcgtggccaggccaacaatatgtttatgagatgcagggttgattgtgaagttaattatttaacatctcaattataattttggattatatttaaatctgggcgattgcaaggtaataagaaaatatgctcgagatcgatctaatcctagagcataaataagaacattattatgacttataatctccagagcacgattgggtccttgatttcctgtgaatcactcatttgatacagaagaataagcttaatgcaggagtatggtgattgtgcagaaaaaaaaaattccttgatcatcggccaggttgcagcttctccaatattaaatgtaagcacagctcctaaagctggggatgactgctttgcacgatgatcaagctaatcacaccagtggaaaacaatgtccatactccagaccgtagtagctgcttcgtaatgcagaccacacgatccaaaacaaataaaatctctcatgtgattttgttcaggttatattatgttgtcaatagaaaatttattgcggttttaaacaccccatagaacatgtgaaggttttctttagtactagtattttttttgtgtcatttaataatggaaacatatttgggatctaacaggaccaggttatcgatcaactagtataaagccaacagccaactgcaagagttttcattcatagacgcatcgcatatccacctatttctcctctacaagcaactaattccataagcacaagttcttccttttccatcgacc

SEQ ID NO: 6654 - DNA, 2000 bp, Oryza sativa
cagtcgtaaagccatttcaaccacagtaatctgctggtaatttttttaatgtcatataaatttcataggtagtgatattactgctgatttcccaccattcaactttcttaaattaatgcctaatatatcatgattatttttgctggcattggtctctttaagcatgtgggatgtatatttgtgggtgtgagtgtggtgagcgtgcgtgtgtcttatcaataatgtaattttaaatttttttatataaactattttataattttttaagtaaatttcatgaaacctcacatgttatgatttaagttgcacaaaatcacaacggctctggtacatggcatataaccatagatattacggtcataagatttcaccaataaaaatagttaacttacctacaatatttaaatgatggattaaaagaattcatatatttcggaacttgtatgcatgtatggtagatcaaagaaaatttagttaatggtgtatataaaactaaatgtcatagtaccagcattacgtgcaagtgtgcaacatgccaaaactccaatagttttatgcaaattggatcataacatcgtggttacgtgaaatttactactatctctgtcttaaaatataacaacttaatactcggatgttatatatcttagcaatgtaaatcttgacatgggacatatatccataataagtagcagtacatattgtgggatagggcgagtagtttttttaaaaaaaaaaacgaaacggtttaaaaactaatccatagttagcaagtggttaagtgagcaaccgtttccatcaaagacggggcaaaagtgagcggggaagacgacacctccgcagctcggcgcacaaagcctgcaggaaacccatcacctgtaaccaatccttccatcttctctgccttctccttcgcttcaccacctcgccaaaaccgccttcccttcccttctcttcccttccaacctctcgttgcggtttgcgctagaaaaaaaagagaggagagatttcaagaaaccgtgggggagaaagaagcaggcaagaagtagcagcagcagcgagtgaggctaatctggtcagtttcagaacagattctttgttcggtctctatccattgcaagaacgaggttttgttttttcttttccctttttttgggatcaagagtctctccatttctgatgctgctgctgctgctgatgatgatgatgatgcaaggcttgtggcaacttgtttggtgaaagaacaacgagagggatactgggatagggatcaaaggcaaaggtttttgtttttaccccgtggtaattgttcgttcggtttgtgatgggatagttgctgggactgtgaatcattttgccccttcttatcatacagacaggcgcgtgatttgaccagcttgtcgtctctgctctgcctctatccatccatccattcatacatccaaccttgggggttcttgattctttttctcatttcttggggaggcttaattgttgctatcgccctccgcttcaggtgtccatttgaattcttcgtcgtttctttcgtatttaattgccatttgctgatttgcctctttatttcggtgggttttatggtaataaaggtgtggttcctttatcatcaaatttgaggtgttctgggttttctttggttcttttttggagcactggatttgtgtgctcttgtaaatcaaatagagtttgtggtttggttcgtattttacacaatcgagttgtgtttttattttagtttgtatcgaaatatttgcatacttgtttctagttccttcaggcttcagttctcttcattattataaaaraaaatttggtcctttcgtccataatttttttcacaattccatttttgaatgtatgagcttgaattatgtgacttttcagtttgagcttgggattgtcaccttttcatggacgggaccaacaaccatggagcactgatggacgattggatgcttccctcacccagtccaagaacactc

SEQ ID NO: 6655 - DNA, 2000 bp, Oryza sativa
actagctagctagctagcaaaccaggcggctcaattaattagtgatacatgaaactaaggaaagtgggagctaattaaacaccagctgtgcagtgttaggcctcaaatggcatgtgaagttatgtatcgtcccttgattgtcatcgaggacaagatcaagtatccatgcatgtagacgtgtcgattaattgttcgtctgcagtactttgcttaattagctactagctcttgctaggttaattacatacatacatatagtaagaaaaaataaacttatatataggacgcgtgtatgtatgtgggatggatgcaggagctactaccggtgcacgaatccgcggtgcaacgcgaagaagcaggtggagcgagctgtggacgaacccgacactctgatcgtcacctacgagggtctccacctgcactacacctactctcacttcctccactccacttcttcctcctcgtcgtctactaccacccaacaacaactgcagcctcagcctcagatgatgaccaactgcaagaagaagcccaagctgcacctgcacccgctgctgcacgacgacccaccccmacccccaccgccgccggaaatgacgaccatgatgataatgcagagcttcagcatccagcaacaacaacatgatgatgatcagctgctgcagcctgctgcagatgatcacttgatggtgcaggctccccccgatgattgttacaatattaacggcagcagcagcagcggcttgatgatgagcttggacgacgacgagcaggccgccggcgccggcgggctactggaggacgtggtgcctctgctggtccgccgcccgccgccgcccatctgcaacaacaacaactactactactcgccggccaccacctgcacctctgacaacgagtacggctcgtcggcgtcggcgtcgccgtcctcctccgtctccgtctccagctggactactcccatgtctccctgcatcgacatggccatactctccaacatcttctagctatattcaaattaatgaaatttcatctagtattctctagctagctagctagtcgatctagtacttacaagatatatataggtatgtatgcgtactgtacgtacgtagctagtgcagcacgtattactactatagttgttgcttttgttaatttccagctgatccaccatgcatcgtatcgaaaggtacacgttgtatctactactatatgtatgtatcttcatcagagtatagtatatagaagtagtatatgtagatccatcctatgctatgtcatatggaaatctagctataagatgctctcgccggccggctggcttaaatattggcgatgcaataataattaatataatctctatatttgtatcaatcatatattgatgagatattgcacgagttaaatcgcccggactgtcaatattttctgcggctaataaaaaaatcacattgctcatccaatgcctctatcacattctttsttgttcacatttcctcttctcggtggtaatataatagtagcatctgaaagaaaagaaaagtactatatgtttgggcctagtatcatgttggcccaacacatcatacacgtaagatctggccggcccaaaacaaatgcgaatccatgggcttggtttttccacgggccttttaagaaagaaagcgaggaaggaaatgctaatgggccggcccgcatggcagagagagtacaacggctactcgggttgggggcccacagtcagagggagacagctcgtgctagaaaaagtaggcgacttgcccamtccaaccaaagtgaccgttgcaacctcatytccggtcctcttcctcctcctcgtcgtcgttgtcgtcgtcggcggcgcatccagcctcgacgtgccggcggcsgtgggtkgcggggcagcagacgagcaagaaagagatccctagtctctctcgatggcgacggacgcgtcccccaagccggsgccgccgcgcctcaacgtgccgccggcg

SEQ ID NO: 6656 - DNA, 1303 bp, Oryza sativa
  misc_feature (1)...(1303): n = A,T,C or G
ggttaaaaaactgnaatatagacatagttttagcctagcttaaaacttgtcaaatttaaacatacaaaatttaaaaagtgccttctctaaagattcataactaggacatgtaagttttttttttaaaaaaaaaaaagactatacatgcggttacatgtaattaatrgaaaaaaaaccaaagatttaattgaaagtcatcagtctttgggaccaaatgaaaacccattgcagacgcaatgggcaaacagactaaattaacttcgatccttagatccctctgccttgggtaattaaacttgggtcaattcagtcaagactatatgagcatgatgatgttactacagattgtttaagaggtcaatatccctgtcaaagatgctgtcacaatttaatttggtagcacagacaacacttgtgataactagcctacacatcaggttccttgaatcctaggcaagcttcaacagtcataactaagaaatatttgttcatacactcaacatagcattcattaatcatgttcttatttggtaggcctgaggtcgaagaagccgtccacaacagcattaataataaaacttttattgctgttcattatttgcccttcttttaataaatgaatgggaaaattctcctattttgagttcagccctttgcttacgataccagcctttctcaatcaaatggctcaaaattaataacagtttcaaggaggccccctgatgcaagtgcctagactggtctgaaaaagatgcagagatgaaaaggagagaggcagctaattttaagtagtagaaagtgttccttttgcaacaggttctttatttttttattttataaggcaattaactactgagggagcaatacatcattgaatgaaaacaaacttgaaaaataagagcaagcatgcagtacaatttattcagaaaatccagttcgagaatggttaaaaaaaatgtgagtgacaggaaacattaaaggcaataacctgaatttcccctgaaattattagtactctattaattttggacgctctgcaacctgtagataattattcttgttcagacttcagaggatcctttaggagaccctgtccaaacaaatttcgttttcagtatacctaattacttgtcccagatcataacacctatgggaaaaagcagatagtagacgactcccataaaaccaagccatacctacggcctaggcaaatgcaaaatataaagtgccaaatggagagcaagattcagtactagtgaagcttttcttgcattttcattgggtcactgaagctcatgctgcc

SEQ ID NO: 6657 - DNA, 2000 bp, Oryza sativa
ggcagcaaggcttgcagctggcagagtggtggcagtatgtccactgctgttttcggacgagctacaggaaagtgttcttctccgaatctgtgtttatgctggtgtgttggctagtttggaaggaacacaatgcaagagtcttggatcaaaatttcaaggtggtggagcaccttactgcagatatcaaagaggaaatttcaatttggagatcagctggcatatttcaatcatgagaggagtagcccttttaaatattttttttcttttttcctccctctatttctttggggatcctctccccaactcgacagtctaatttcatgatcaactttgtaacactctccttaaaccttaatgaaatttggtcagctttttcttagccaacccgggaaaaaaaaaaaaaagctaaacaatgaaaccaacctgtttcggttgcataagttgatctccatagtaggtgttttaccaaggctttgcatactttcatatttaattagtacatatgtgcattatgtttttctttttcgtaaggaacgccagtccaacttagagaaataaatgtgttgaagtttcggtcgaagatctataatatatggtaaacaaactagctaatagcaatgtattgtatattattttgaattttgaatagtaagactgtaaatattcagagaaagatcttttagatggttttgtctgaattttctccatttgcagaagaacattgtggatattgtttgccatgtctttcgtggtggatcagcgtatttgtttgtatctgattgccttacaaagaagggtgtaatccatctgtgcattcaccttcataaatggcagagtaagcaagatacaaaatcaagatcaacccattttgcagcctattaatttgagccatatattatgcattcaaagtctcgcttttattttaaagagattagtaatttttaccaaatttatcagatatttctcgtgagatatatatgatctatgcaggctcagaatatcagctccaaccatttggaaaaaggagtcaattttgaaacagagtggttatcagctaataaccattagattttctgaaacttgtccctgtatgtttgaatcctagagacgttttggtgtttttagtgaggtgtttatatcattatatatttttttaaatgatgtttaattccaaggtatttatctgaataacaaattcttctatgaatgttttgatatgaatttcttgattgtcataggggcaaacatcaatgtcatcatgaaactgattgagtgtaacttgattacggtgactacaggtaatctccataaaacacaacattttggtaaaagttaaaagatagttgttagattactacaaacaatattataggaaggcacatatataccagagtcttcgtcaaaacaaataagaggtaagtattgattgcacaggcaactgggaacctatgtcaagcacacataagaaatctggcacatgatttgacacaaacgattctcctaatgcatagtataataaatactataaaattttcaccttctcgtgtcacaatcaagtttcttgcatggcaggtaatatttacatagaaaaaattggaggtatctgatggtagatattaattaagccaatcatacacatttttttcatcattaaaaatgaatactttattttttatattccaatatttgcaacttagaacctcactttctttacaagagagtaaagtcctttaaagtatatataaagtttgaaaaaacttttgacaagtgacaaccattccgtacataagatggttgttttcacatttatcactcatctaactttttagggaaagaacatattttaatcaatacgcataaaaatcactttctcaatataaagtaccaactctttcagacaaagacacttgtggaaataagagcaaggcaacaggacttgccctagctgtaaattaatataaatttcccaacagtgtgttatctaaaaccacaaaaggaac

SEQ ID NO: 6658 - DNA, 2000 bp, Oryza sativa
tcaccgacgtgttcgccttcggcacgttccttcttgaggtcacctgtggccggtggccgatcagcaacagtgcgcaccacggccgaaagatgttggttgactgggttctccagcactggcaccagggttcgctgccagagacagtggacccgaagctgcacggcatctacaacgtcgatgaggcatgcctggtgttgacacttgggctgatgtgctcacacccaatacccggagcaaggcctatcatgcggcaggtcatgcaataccttgatggagatgcaccgctgccggagtttacaccggcaaccctgaactccagcttgctggcaataatgcacaatgaaggggtcgacccatacgtcgcacagtacccgtggtcagggaatagcttgggcacaatgacaccagacatcttgtctggaagatgagacctgcacataatgcatttgttagaactttcaagtgcttgcctgcttaggcaaatgacaggcaattataaaatgtcctttgttgtagtatcattagatttaccttacttgtagaagtgcagtgtattttgattaactgtaaatctgtgcaagttactgtgattggattgattctatggtgaatatagatggaggtttgtgaactgcaaagctatgtggatcagtcatcagtgggtagcatgtaaagtcgtgacttccattgtcagcaaaaactgaaatatttacttgagttgttacctgtcactgcaattgatgtctgtctggaaaaaagaagccaattaaaacattgaagcaggctcagcccagatcgaccgacactgcttctctctacacatccatcatggacccaggtagttgcagatcagcgattcctcaagacagattcaaagaccaagggcccagaagtttgccgaatcgacaatgcagtcttacacagcttcaagccttcaaagacagattcaagattcctcaaggaatatagctacaccaatccctgaaagttggaaggaaaaaagaacaggctgaaaatttaacaccaacttctgtcaatctaatatcagaagttcagaacaaaggtggaattcagagacttcattttatttcagaatgtccatatgtcatcctgacaccagcatgaaacaccaagcttgcagacttccaccagaacaaatggcattctcaacaagaggggaaaacacagcccaagaaggatagcttcgacagatcactagttggtctgtgtgcaaagaaaatgatgtcactttctgtttgtccagagaagacaaggcagaccatgcaaagtcatcaatgcactgggaatttgtcagacaacatacctttgctacttacatcactgggttgaaacttgattcccagtcaaggatgccgcctccaagttcagaaaaatatagcttctgtattaatattcagactgttgagatatcccattggccaatgttttgttcataccacttgttagctgctatactatgaccaaaggagtgggttgactattagtaggcaccaatgaaaaattacgtgattgaaagaaatgtttaataaacaaatgatgtgatgtctgctagaattttataggagcttcaatatggtcagcgtcaaatttattgtcagatgtaaacaaagccaaaattatgtagcaacctagcagtctagaactaaccctctggtcattcatacgtcaaacaagtacagatgtataatctcatgcaccttaatttgtttcttagtggcccagacaaataaatatattttccattattaattcaaataagcatgtcattttcagcatttattgcttgatgcatactttggtgtaggcatgtaggaaacaaacaggaaggaggctaggaaaagtatgcagaggatttggacaagcaagccataactaattataaatagcctagatccagattaaattgagaatgcatgttagtgtggcactgcaaaccacactgcatgatccataatatgcaagtagaagaaaagcctagc

SEQ ID NO: 6659 - DNA, 2000 bp, Oryza sativa
gaattgcatctggtttgctctaccttcacgaggagtgggagaaagtgatcgtccaccgggatattaaaacaagcaatgtcctcctcgacagcgagatgaatagtcgattaggtgactttggcttggcaaggctttatgaccgtggtgcagacccactgaccactcatgtggttggtaccataggatacctagcgccagaactaggccgtagcagcaaggccactcctttgactgatatatttgcttttggcatatttattctcgaggttacttgtgggcgaagaccaatcatgcaagttccagagggcgaacaacatgtgttggttgactgggtgctcgagcattggcacaaaggatcaataactgagatagtggatacaaagctccatggaaactataatgtagatgaggtatgtctagtactaaagcttggattattatgctcacatcctctctccaatgcaaggcccaatataaggcaagtgatgaagtacctaactggagacatggcaatgccagaactggtgccaacacaccacagctttcatacacttgcactgatgcagaaccaaggattcgactcatacgtcatgtcatacccttcatcaacggcaagcatgagcgccatgtccaacaacctttcagcacaaagatgaattacagtgttaacatattgtacttatgtaaattttgcatgcttagtcacttagatactcaagtgtggcctccattttcaactttactgttttattttttttaaaaaaaaataagttactgaaaaagagttatactgtttaatgaaattcaggccaaaaagtaccgagtgaaattactgaatttcaattattgcagtggataatgcaaaaagaaagaaactgaaatccataaaagcctaagtgcaagacatgagaaattcgtgattgtctaaaagatcagaccaaagtgttgaagtaccatacctccctacatatcttgttcatcatctagttttgttaggtgacttgtaaggtatcagagtcaagtcaagagaggtactgatttaaaatatctaaacactatgatggaatatagtggtgatgttgagcggttaaaatcctttcctgaacaacagagatatttttcacccatctcacacataccattacaaagacaaaaaaaccaatgccatgactttcagtttaacaaataacaatgcatttgtcatctattttcacaaactccaatgcaatgattgcataagagatgaagttattttgagataaataagatggtgaaaaataaagttattttgggacgggggagtaataatcacagcgcagttcaagttcacttcttaaccagacttagctggacaacagcctagacaaaccaaagaccaaacactatcaagtcatcgtcgaagtggacatgtcagaaattaagtgaaaactacagcattgacaactgcaaatctactatggctagaggagcacggcattccattcttcaacacgattatgattgatcagtcaaaatcatgtggtccaacacgactgtgataattgattccggaaaagaaaatttctgaccagaaggaagcacaaattttcgctcaacttccgctacacacttgctgatctctcttagaagattcgttgacgtgtcctgtgacgttgttgctaaacaaccctggcatctgtttccaggaaacagtcaagcaagcacaacaaataaatgttttgataagttctttagtaaagaagttctgataagctcaaatggatcgtaaaaaagaaattccatcacatgctttgactacaagagggcagtaatagtaccagaaaacgatggtcgatttatcgatttccgaatgaaatccagagcacttgagaccatatgtaacaagaagccaccgcaccaccagtaagtaaacttcagctgcaaatgttatggagttgttagtccatatcagttttcagaggaacaattggcaaaaacaagtgcaccgtaccgcgcctttc

SEQ ID NO: 6660 - DNA, 2000 bp, Oryza sativa
cacgtgtaaaaacaggagcctcgagaaaaatatgctgggacccaccttcccacagcgtcctggccatccactcgcgtcctcctgaagctaccaacgccgtagcgccatcctgaagctacctacgcccgttgctggacgtcgttagacgagaatcagacggctgtgattgcttcttctgactcgaagggacgagaatccgacggctgtgattgctcttcattctcgcagagtcgcagttcgatgtccaggaataagttttttttatttttaaataagtccaggaatacggtacgtggttccggaattttcctggcctctcgtccaggtcccagagatcccattttctttggggctcgccagcgtggcagccaaacgggagaccatgtgagccgattgattattttttgcattctttttttttctgagctggaggctcaccggtagagacatcttggacgcgaggtaaattcagaaaagtagaaaacgattgaatacagtagctaagacgagtaatagtatcattttggtcataagcacgtgttaggtaggatatccttttctagtactgctctagctctaaaaaagaaactgctttgctgcttatttttgctctactaataaagaatgtcagcgcagtttgcatgtgtatataacatttttggctaatggataaatgggaatggatcacgttatgacgattctataatgtctcttccatctaaggaaacaaaatcgtgtgctcatatatcaatcatgaaatcatggagaataatcagacgttccttgattttcgagttgagatgtcattgcatctaaaggtggagcgtcctgtaactacgacgtgcccattgatccgacgacaagaaaacatggagtatacttttcctaatacaacgaatctcgataggggttatatcatcccagaatcattatgatctcttttagattaggttttttttaacgaagggagtataaattaagtaaatcaaagtaaagagtaaagatagttactagatggtaaaaaagcacattaggccattcacaacccaaaacactaacatagtttccataaactctatattattaaaaaactagtactacacactattctttcaatgcaaacaccaatattccatacttaaatttaatgctacttatctcacatgatgtcttggatattgtgtagaaaccatgtctcatgcaagacatggttttattctctttcctcatttattcacttgccacatcattttttttattctaggtggcagcttatttattgctatgaataatatcctaatcattgggttaggaatagccttatattgccttttcgctcaccatatgatctcagagattttgccgttgccatataattatgcaatggaaaaggctatacgtactaactttttcttactaaattcttactaacactgatgtgtcatgctacgagtgcatctaggtttttcataacttccatctagctaaagatttagtaaaaaaaaaaattagtatgcgtagcagtgcycttatgcaattaagcgcgatcagtggagcaattagcacgctgcttcccctaattaaccgtaaaattccacatcaccgtgaggaaatcgttagggcccacaaagtcatagagaaacagagacgactagacggagcaagatggaagtacacagtcaaatcccctcacttctggcgcattccgctcccgcgaaaatcccgaaactgcccacgccagaagcttccgtcaaaagcgtcacagccatcgatccttcgatcttccacgcgtacgtccagatcaaacgccccagttccgtagcaactggaccatttcgccccctccgtttcctatttatagcctcgccaccccgtgaccggagaaacccaagcaaaccagcagctactaagcaaagcacaaccaaagcttaagcttcctccaaatcctcacacaagaactcgctcttcttwamcctcccggattttctccgacgagatcg

SEQ ID NO: 6661 - DNA, 2000 bp, Oryza sativa
atagataaattatcttatccgtagaatgacatgaaaaaaagttagggctaaaaattactcattttatcttatccgtagcatatatagagtacgttccatacatccatcttgatacatgatagtatggctgctacagtaaatatggtagcttttcctataaatgaatcattttgtccgaagaatgacatgaaaaaacttagggctaaaagttactcatttgatcttatccgtagcatatcctattttactcactaagttgtcgcaccctttttacgaaaaaagagctaaaagtagaagttatatagaagacctaaagtatgcacttaacacttctaaaaacatctaatgtagtataatagtaacacacaacaattgtcgtgaaacatgtacttcttaattctttatctttattcataagagaaattcaaaattactttagaaagttttatgaccaccattatattgtgtgatcagtaaaagtcctgtgaacgtatgaaataatctcatacgaatttgatcaaaaaaattttagggaatagatcatatactgtactccacctgtctcaaaatatatgattcgtagatatataacttctcatactaaattaatttattttggacgaagtgaatatttgttttaactatgtgccttatgataaagattctgtgttcggcactcactgctgggaacatatatgttgcgcacgaaaaatagagcggtccattagcgcgtgattagttaagtattagttttttccttcaaaaatgaatcaatatgattttttaagcagcttttgtatagaaactttttgaaaaaaaataccatttaacagtttgaaaagcatatgcgcggaatatgagagagaggtgttgggaaccaaatgtaccgaactgggggtttggatggaaccatgtcacatcagatgttggacactaattagatgtattaaacgtagattattgacaaaatccattccataactctaaactaattagcgagacgaatctattaagcctaattaatccatgattagtctatgtgatgttacagtaaacatgtgataattatgaattaattaggctaaaaaatttgtcacgcgaattagctctcatttatataattagttttgtaagtagtatatgtttaataatctaaattagtgtcaaacatcggatccgatgtgacaggtactaagatttagtctctgaacccaaacataactgcctagtcaggatgtaaaatatttccaaggtgagcagtgactgagaccaaaatctcgcacaccattcccatgctcgagcgagttcatcacatcaaccacacatttcatcatagattaccgagtagagagtgcttctcgttcacacttttccaaacgatcgactgcataaaagagagaagaagaaaaaaaaacacatttctcgctgagctccatcgatgacggatgactcacactgctgacaaaagagcagatttgcaatttgcaaacagcatcggacgtggaaaacgcccgagcctctcctgtctcctcccggtcttctgcttggaagaaaagaaagaacccgccgcccatccgcgcgcgggccccgtgccgttccccctcccccgcccaagcctctgcttgcggcttgccgcttagatccccctgtcctgtcctgtcacgccgaacatctgaacgcccgaggcgagcgagagagacaatcccgcggtcacctcccctctctctcgctgcgccttccgtgtacaccaccatcacaccctcccgtccgtccgatccccccctccgatcgcgtaccgagcaaacacgcacacgcacagccgggaggggggaggcgaggtccgcgtcgttcgcgatcgccttgggttgggttgtgtctctctctctgtctccagtgatcctgggccaaggaggcggatggacgtgcgccggggcgggggcggagggcgcatcgtcggggcggcgcggagggcgctcacctggggggcgctgcccctcccg

SEQ ID NO: 6662 - DNA, 2000 bp, Oryza sativa
atgtacacacgtacaggtatttggagtgcttagcacgcattcaggaggcaatagcccaatacgccgttaggtaagtactgtacgtatgtacgtagccaatactagctcctctgttgcttgcatgccatgcaaagatcaactccgaatgtagtactcatgttccgctttttcgaggttgtcttgtttgttcttcttcagagcaggtccaataacagactataagccagttgtaaacatattttaagaacataaattagaagagagaaaggcagcgggctacagatttatagccagctgtagcacgaactctaagagacagtgtgtgtatgataggtgggaccaggtattaatagtgtacttccttcgtttcataatataagtcattctaacatttctcacatttatatggaaattagtgaatctagatatatagatgtgggaaatgctagaatgacttacattatgaaacggagggagtagtatgtaactattgtatgaatgagctattagattggctataaatgaattggagctagtagttgactatactattgaacttgctctcatgtggtagtactgtagtagctagtaactgatcaccgattaaattcctattaagtactcccttcatattttaatatatgatatcgttgactttttaaccaacgtttgaccactcgtcttattcaaaaattttatgcaaatataaaaatacttatgtcatgcttaaagaacatttgatgataaatcaagtcacaataaaataaattataattacataaattttttgaataagacgaaaagttaaacgtttgtcaaaaaaattaacagcgtcatatattaaaatacggaggaagtatcaaggactcctctttcgatcagagacaaatggtcatggttttgatatatgtcgctgtcaccagttaaccacttgcaattgcaaagcgagctagcaggtgggggaagtgtggctaattgacaataaatcacgaaaaaaaattaacaagtgacgatcccttgatggtcaagctagcctcgcacaggccgggctatgcatacatgtctcactgatcgatatgggtatggtgtgcatgcgaatgggaggaagaaaaatctatgcgatggggcttgaaaccaaatctccagtcccaaggcctcatcttatattctcgccacctagtataaaaaatcatggtactttgtttaaactattataaaactacaaaatttaaaaccatgtatcacaaaactaaaatgttatcatataattatatatttaagaccaaatatcgtataactaaaattttatcattagcaccactgttatattgaatgttatatttcctggttaaatttacactagatctttagttccgtaatttgtttttactaaatactctctccgtttcacamtgtaagtcattctmgtatttatatatatatatatatatagattcattaacattaatatgaatataggaaatgataaaatgacttatattgtgaaacggagggagtatgtkgttttaatttgtgttgaatctatagtttcataacaaatttgatactaaatctatatttttatggtacatcaattttaatacgtaatttttaccatagtttcttcaaagtagatgttgttttataaatcgtgggaagcggaagcgcatgcagcggccgcttgccgttgttatgaacggatacgatacgtgtaccactttgtgtgtgtataaattgatagcagcgtgcctctcttcttcttcactgtggtcacctgcagtttgccccacagccattccaagcacatattccctgcaccctgctagctaccttgagttgcaattcatccttttggcagtaaagttcttagtaatattacccagttgctacgtagcagctcgctgaagaacaaaggaaccaatcccacctatctgaatccacacataaacagtagattcttgttctcgcttggatagctacagcctacctctgcaggcgct

SEQ ID NO: 6663 - DNA, 2000 bp, Oryza sativa
ggagtatcttcgaacaggacactgcgtctgcgtgcctatgaattgtgaggcactagttctgtgccctggtgaatggtgattgttcagagaatcagagctcaaattgcagatagttttctgattgtttctgggtagttccttcgccggcccggcaaaaaacaggattgttcctgatcagtacacttctccgtgaaagctaaggacgatccttctctgtgcccgtatgtgtcgctttcctgataatacgatctttttgctaggcaagttgcagactcgcggtatcatttttttacaagcgggccgccattcttgtcgtctcgagatgatcttttgtctgtactgtagctgataagtcagaccactattctggtaaagaacttgtccgtagcatttgtaggaggttagatactgaaatattctaatcgccagttgataagcaaattgctcctgaactatcgaagaatatctttgtctcgtcactgacagttccagttctaactgctgatatgcctgtcttgtaagtctattactggtccttggaccttaacaactgggccttcaggggaaatctgtgaatccggcccataaggtcaatgggccgaaattgatcacctctggccggtcggcacgggtttgatttcagcccaataaaatttgaagctggaaattttgcttggaaacagtcagaaagagagtagaacacctccctttgtgatgaccgcatcttcggctttcccatttgtttgtcttcgctgaggtggtgaaactttgtgaaatagggcaaaaggcgtatcttaggcagcccagctaagagatatggcttcctcaactgaatcaaggccacctaaatacctacttcaatcacctgtcgaatagtcgaacacctgtattgcatgttcaactgctcagagccgggtcagtgttttggttcttgctttgttcatttgtacactactaaattatttctttgtttatactttgtatttcgcggatggttcaaagccgagatagcagttatcaacttgtcatggaaagagaaaattgatttagaatgtagaccattcgtgaggacaaggtatatcagaacattctttttccacttttcactcgtcgtgtttaaatgagaaaaatcgagattccaactgccttgagaagagcatctcgctttggaacaaccgaaccccctgcattcccactttgtacgccatggtttctcgatttcttcctccctttcttaaatggagcaaatataaagaaacaatggcatgggctaaaatgcttcctgtcccaagtcaagctagccagaagattatgtttccctacattctgattggcaagttggttattccttttctgattggttaggttggtgattcagagatgtcgagacgtgtgttcttttgcatctcgtgtatgctttggtggtgcagttggaagagatggcgtctctggtctaatatctgaaaacggcactgatgacaataattgctggccatggtttcagcctacgacccttctataatcgtcagattatctcttgcgtgttgcgtgtagctcaccggaaaacaacccgatagaagcttcttgccaggtcagactgtaagcataaagaatccaatcacgaactctttgttattttgaattgacaaaaggtgcttgaattctaaacacgtcctatcatgtcacgtagataatatgacacgagttgacaacaacatgaaacagacgcaagaccacacacacacatacacatccgctgataatctcttgaccaaaccgatccaaacctaccaaacacgcgctaatttttatttagacatttcgttcgacgtaacctgcggcgacgagcgagcgttcccgcctcctggccggctgctgaccaggcaatccgtgtcgtagtggtggactccattgaaaatccttaaatcttacgtgacagcagctggattttgcaccgatcgcaccacgtctccgtctgtttgcggctcaaggtttcagcg

SEQ ID NO: 6664 - DNA, 2000 bp, Oryza sativa
cgatgacggcggcggtagacgcgatgtagaggcggcgtgtccggcgcgtagcggcatggtcgatgcggctcgtggtggccggcagtctagcgcttgggtggcggctgatggtgggcagcggcttccggcttcgagtcggcagcgcgtcgaccagcttggggggggcgtcggttcttccgccacccytccccacctcccaccccctatgaaaccaccattcttctcttcctttctctctgccttcctttctctcttccttcccctccccctagtgctcatctctctgtggtggtggtgaagtcgcaggtggtcgctgaagttgattggtttgtcccgcgaagcccggagttcttcgccggaaatatggttgacaccgatgtctatgtgccctctcttcatatctcagttcctctccaggccgaccatgcctccttggtgccccctccattggctatttgcttacagatctggcagtgctctttcggtgcttgaggagtttgttcgtccgcggtgttggtcttgtctgtctgtagttagggctcttaggcctcgttggtgctggctgtgtgaacttgttgaagcgccaattttgaagcggtgtgcttacctctatggtgcgagagttgtttcctcttacttcttggaggtcctgcacttttgagtgagtccgggggcaaaagccctgcttagtcgtccgggatcggcaatatcgacgcctgccggtgctgtttcctccttggaggtgttgccttgtggactctcccctccttgtgtgaaaacttagtccagctgatgggcgggtgtcgacaacggcttatgtcgttgttcacctccttggaggcttcgtcttagggtttttgctcttccctcggccttctgcggtccgtagtcgtttttgccttcaggctttctgtgtctctatgtgtaaggtttttatcggttttactttagcaaaccgtatagttgtatagtttttggtccggtttttcttataaacagggtcaactctattttgtaatatttgccgcttccacttaaaaaaaactgactaaaagctgtgaattgtttcagtggtcaaaaaggttattacacgtttggtgtgatggtggagaaatggtctactgcgcgcatgatttttagcttcaacggtggtaatgccaacgaaaatgtaaccggtcagatactccgaagctgcatcctaaatgcaggtcctctcactcactggccactgggcctgagcactaaatccacattctctggtcccacacctgtcaccgtcccatccccacctcggccacagagagtacagcgtaatcaacacttcaataacaacccacatttccacaaattgataatccttacgcgggaacgacgaaaaaactctttcttcagctaccatttcgaccctgcagtcatctcactgacgggtgtgccccaccagatgtgggccaccctatatttattcgaaatttcgaaatcaaatcggtgcgagcgatgagccgatgagtagagtagttaacggttaatcaggagcacacataggagtatactcgagcgaagcaccgcacccgccgccacctcaccgcccgacgacgacgacgaggccactgcgcggtggggcccacatgtcggcaccaaaataatttcgtcttggtctcttctccctctcctcctcgccttctcctccccccatttcgtcggcctctctcgagtcctggactcctccctcgccacctccccaaattagcagaagccgcgcaccacgcgcacgcgcacgtccgcgccgaggaggagctggcctcgcgcgctcttcgaggagagaccgcgggggaaaccctagaggctgcgccgccgctcgccgccggccggccgcggcgggtggtggggcagggcctgacgacgaccggttcaacaagcagtaagatctgaggttttgggggtgggattagggttgttgccggggtttgtttggtgttgcggcggcgccgcgragggggttc

SEQ ID NO: 6665 - DNA, 2000 bp, Oryza sativa
ctatttttacttaggcgtgtagctatgccctactccctccgtcctataaaaaattattttagtactagatatgacacatcctaatacaacaaatttagatatacctttgttcagatttattataatggaatatattacatctagcactagattcgtttttttgggacagagggagtcctgtatattacccagccatgaaatgctgaggtggctggcacaggttgactccaggtggcggctagcggaggccgcaggtggagaccggagaaggcgccggccgggcattcttgctgacgtcagctgttaggtgtgagctggccactttgctgacgttgcatgctgccgtggcgcctggcttatcgatcgttaccctccacgtggacactatggtcaatgtgtactgcagtgatatgcactactttactccctccgtccataaaaaaccaactaatactggatgtgacacattctagtataatgaatctgaacatacatctgtctaaattcattgtactataatatgccacatcaaatcctatatttaatttttttttgacagagggagtatgtgtggttaatatttttattgttattagatgataaaactgaatagtactttatgtgtgacttttttaaaaaaattatattatttaaaataagacgaacgatcaaacgttggatatagaaacctacaactgcacttatatcgggacggaggtagtatctaccttcgtcgtaagatgttttggccatcgtctagatagaatattttatgacggagaaagtagattagttagtataataattttattcaatctcatagcataactagttaatcacctttatttaacacatgcacaccggtggtacgcaaaattaaggctgtgtttggtccgatgagttgaaactaatctctcgcacgtaaaacaaagtgatttattaggatattaattaagtattagctaattttatatagaaaataaaatattacgatttttaaaacaacttttcctataatttttttttaagaaaacgtatcgtttagcagttttgaagtgtgacgtaagcatggaaaacaagaaccaaaactaaggtaggaaaattgccttgtgaaaatagaatttctgatggatcagcatgcacgtagtgtacacgtcactccagcctgacagccatatccatttggaagctactactactacatggatcacactagtacagtagcacaagtacaatacagtttggcagttggcaccggtcgccgcctctgctgcccagaccattccattggatcattccacgcttaattttccatcctgtggactagctcaattagctcctctacaccaacacaattaattaattaattaatacaacaagtaataaatactccatccggtcctataatatagcaatctaatacaggacgagacatttcatagtacaacgaatttagacatgcttcctatccagattcattgtactatgaagtgttccatccggtactagattactatattaaagacgggggagtattttgcaccatgcacacactacagtactacactctcttctcttctagaataatcttgctagtagaataatcaataactaatgaatcccaaccatgcatgtagtactaagcaagctagcttagtagggtatttagcaacacataatcaatcatccacagacttgattataaatctctaattcatccatgttgatccatatatttttctcggtgtttgaccccaagactccactccatctctctccatgtaggagtatatgtttctagtaggagtacttgtcctcctcatataaaccccacactcttcccctactcttcaattctactcaccactcctcttctccatttctctcttctccttccatttttcttgtgcacttctctttcccttgcaagctcaagaaacccaattaattaagatagttgtgatcatctccaagcttagctaattaagctactagtggcc

SEQ ID NO: 6666 - DNA, 2000 bp, Oryza sativa
tgaggctagcttagggtaacctgttgttagttgatgcatatctgcattacttttttaagtttcttcattgtttgagataattgatatgttctcggaatacctcggttctaaatatttgtcactatttactgttcatctccaatgtaaaaccatggagattctatattgctatgccgtttccaaaaaggaaagaaaaaaaaagagagagagaagaattgggagatgctacttggagtgcaagcaggaaaggggatcattcaacattgtcctgtcatctccctgctcatgcctaatgtcacaacagtcgatcgtaatatgggatttcttacagctcgttcatccatccatctagaaaccatcgagtatatctaccgcaacaattagaaaagaaaattttcccctgcttgtgagccattgtagctttggtcacattatttgactcttatttgccctcgaatgctataccaggaggttcagttcagaagtcatcctcattttatcactgtaattggggtatcttgagttcttaatccattttagagtacagatttgtgatccaatttagatgtacacgtgctttagtaaaaaaaaaacmgaagcaggtaggaggaggcaaaaccgcaacaggtagcagaacagatcacacaacaaaacatccacgaattgcaagctgggaattcagaccgtgacgcaggccgtgacgccgccgctgcggtcaaggatgagagaacaatctggaactgcaagcacacaccaaaattaagtactaaaattcttgactgccggagagatagggtgartgcgtttggtaatcgtgtgtgcacgtttgatgaagcatatcatatccttgtcgaaaagaacmaagaaaattaaggaagcacccgcctactctgtattagcggacgcaatatcacagcaagaaacaatctgtatgtaaattttctcctagcaggtaaaaaactgatactcgctccgtccctaaatatttaacgctatttattttttaaacatgtttgatcgttcgtcttattcaaaaaatttaagtaattattaattattttcctatcatttgattcattattaaatatactactactactcaagtttttaataatattcacaaaagtttttgaataagacgaacggttaaacatatttacaaaagtaaacggcgttaaatatttagggacggagggagtacatgacttacttatcttttgctaggaatagagagtaggcagaaaatatataatgtaaatcatagcgtgaatttaaaaactatagtaggtttttttttaaagaaaaattgagaaattcccaagggtcttccggctagctccacaagatggtgggctagatgacctaggttcaaagcctcaccccttctaattatttgatattaggtcattccctaatattcgagttttttttaaagaaaaatcatctgtgatttattcatgtagtaccttatagtgacgtagataaatcttaaaatttaattttctaattattctacgatagttgtaaagtttgcaacaaatatttttcccaccattgcatataggtaataatcacttcatgaggtgttaaattctggctattatccttggtgtaaaataattttggaagcacatagtatgtgttatgtacattttgtattgcctcgaaccatctagtacaacatcctaacaaaaaaatatataacgaattttagttatgcatttgtattgtcaaaatccaaatgcatatatgtatatgccaaaataggccacacccatgaaccaggaagcctctttttggaataatcaacggactcataacagtcactgctgacgtaagccacacacatctccatcgcctataaaagctcacctgaacaacctccaaatcacacacaaaacgcagaagcagctagcttcactgatccacattactaccagcttcttcttccaatcttcttctccgacgagcagctagccagctagcggcgccggccggca

SEQ ID NO: 6667 - DNA, 2000 bp, Oryza sativa
caggataattggagaattggcgtggaaacacattaataggagctagctctctatcagtcccaaaatacagcaacttctagcagacaattaacctacatcattatctcaatcaattataactatttctcatttaatctcatcacactccttaaatttcgtgattttttttaaaagtgtttatattttagaacggagagattactttctctgtcccataaaaaatactacctctgatttaaagttttcttataaggttaagggtgtagcttagtaaagttttcttatagggtggagggtgtagcttagaacagccaaaagacaacaactttaataatggtctcagaggcaaaggagttggaaaccaaagctgtctgcagcagtgcaatgtcaacttaaagaggggttagggggcggcaagagataaggggatagaagattacagttttaaggtagttagcagctgccgtcacatggggtggacatcatcagtgttcaaccggaacaccacccttgtttgagtagtacctatgcaatcctcacccaaaataaccatataaaaatcttatatgcagctaccaaattatccttctaaagtgaaagaaggaagagcataaaactcttatatacagctaccaaattatccttcatcgctgttatgttgatgtatgagtggaattggtatatataattctagtttgagtttaccttgtctatggataaactgattgatatacatggactcagcgcttacctaattatagaacctattggtaattaaacaggaccatatgttttacaattccaacctatgttgggagtctcaaatgaagagtatataattgatctagactttatcctcttacatgatattgcacaaaacttacttaaatatttatactattttaaaataagatagtgatggtggtagtaaatctgtcatcccacccactttattttaaattacaattacccattaaacttctttgtactaaaactcaaatcactttagatagccatgtataaggtcaaattaagttgaataccggtaaacattggtgatacattccataatcaaaacacgagcaaactatatttttttacacaagagcaagagctctgccttttattcaaggagagcaaactataattcctccagaaataccttttttttattgtaatttttggtacctcaacacgtgagaaaccaagagatactaattaaagtttgcactacaatggtggtaactctgagtacgactgtacgagtacctcctactaatgattattaagcatatgaaattatcccggttgtttgttctttgatatgccttccacttccacgtcagctttcccacactggtctaagttcttggcacaatattctcttctggtttccatgttttttccctaatgattagcctctaaaagacctatatatttagctgttgatagaaaatgttggactaaagaatttatagaagttggcatgcacgagccaaccgtcctacacctcgagcaagtttcctataattgaggcagattaagaacaatagcacttgtacacgctgaatctgaaattctgaatgcattttctatttcttctcaccctcttgcattgacccttcgcgcattctttaatcccaaataacccaaaactagccatcaatcatacatagaaaaatgcatcacaagaaccaaagtaaacaccggccagaatgatgccattcccttgtaaaccaattcaaagtttcaaaccccaaaagccattccctgaaattggagcaagctttcacacagggaatttgatcaattaaaaaaaccatttgagcacctaacttgtgcaactataaaaggggtaggcctcacagccccctatgcaacaacaacttcaagccatctcctcttcattctctcctagctttctcccaacttccagccattgctctcatagctgatccaccaaggagctagaagtaattccagggttcttaattgcggca

SEQ ID NO: 6668 - DNA, 2000 bp, Oryza sativa
atattctcgatggagccaaagatggaaaagatagaaaatatactccgatatatctagatcgaaagtaatcaatcaatatatacagtcaatsgagtacagtrctagtcagtggtagctgtgtattgttaattgcctgcctgccttggttttaacgatatagcgtcccataataggtgatgtttttgactttttatttacaacgtttgaccattcgttttatttgaaaaattaatataaatataaaaaaaagtcatatgtaaagtacttttgataataaagcaaatgacaaataaaataaataataattccaaatttttttgaataagacgaatgatcaaacatcgacaaacaaaaactcaaaaaaacaagtaatatgagacggaggtagaactaaatagagtattatatatctgcgccgtgcgggtggtttattcttctataagactgtgtgtttgatggtggggttggaaacccatctcttatacacgaaaaacggaacggtttagtagtacataattaattaattattaattatttttttaaaaagatcattatgattttttaaacaactttcgtatataaattttttttaaaagaaaacggacagtttatcagttttaaacatactatatacgcacgcagtatgtacgcacttgtgaatactgtagtaatatatcatggtatttgtcgacggtggacagccgtaaaccggatataaaggtattggggtacgttggtacgaggatctacgtagtacgacttcaaggaaacatgagacaaagattatactggttcaggccccttaataggtaatagttctaatccagttggtatgggattatatggtgagaaccacaaattacaaaggaaataatagaactcgatgataccgacgagatcgtagtcgagttggttcgactagatcacccggcgacttggctcttgtagactctggcttcgtaggctgtagttattgtcttggctatgagattctatgccttaggtcctcacgggggtcccttttatatcacaggtcaggtggtcttcaagtaggactcggagatatcggaccctgcacgatacaatgacaacctagtcctatacgggtaggaactcttccactggtgaacttcgtgatgaatttccttagcgtatacagagaacgtccgtacacgcgcagatgtaccatatgtaccatatgtcgtacagcgtacatccaagggtagagggtataccttatccgtaaccctaacagtattgataatcagtagccctgataattaagataagataggactggactaattaatcactactgctagctgggtaggtactgtatttgcaagagcaaaataatacagcatgcagttattttgtgtacagtaataaaaagaagagaaataattgagtagagcagtagtatgcaggtagtaggttggtaggtggcgtggatgaaccgtatactcctagaaataattgagcacgtttgtctacacaaacgcaacgcaagagactagggaagcaaagtacttgatgcatacgatctcaactcgactagtatgtatcatgtatgtacgtacgtatgtactgtattcattagggtgggactgtatactatagttattattactagtattgttgacaaaaacaattcctaagttttgttctaagaagaagagcaacaaacgtaagtctataggagtactagatctttgcatatagtacccaataaatagagggagagagagtgcgggccaaactcccaactcccaagttgcaatcgagaataaataaaaatcccaatcccctccttctcttcttcttcctccctgttcccttttcgattcgattggattggattgttttgctggctcgctctctctctctctctcgtggtgtggtgtggacaagaaaggaaggaaagatggagggcggccttagggggggaggtggaccacctcgccggcgagagggccaccgcgcagttcgacgttgaacac

SEQ ID NO: 6669 - DNA, 2000 bp, Oryza sativa
ggaactaatgagagagtttaggactcggaggtgaatcattggagtgggttagggttcggacattcgacaaagttcacgggtggggtttcaggacggaactccaaatagaagggataacttcgggattatattaggatggaaattttgtggagacgatctttgatagcaggaagatggactaaaggagggattcaaattgagatctttggcacaacttagactcagcactcaaggaatcaaaattttcgcaattagggttgtttgtaaattagcttttaacgccacgcagaaattgaggcgttatacgaatgctacttaccatactccgtaaaacagaagaagtctaggactggatgatccaaaacctccagaaatacatcaggatcaagtgctggtaggtactactaccgtataagcaaagcaggaacaacctcatgtcaaacagcataggatgtgagatgttatggaactactccctccgtcccataatataatggattttgagtttttacttacaatgtttgaccactcctcttattcaaaaaatttgaaattattatttattttatttgtgacttactttattatctacagtactttaagcacaacttttcattttttatatttgcaaaaaaaatttgaataagacgagtggtcaaacgttataagcaaaaactcaaaatctcttatattgtgggacagagggagtagtagactagtagagtagtccatggctagatggcaacatcaggtgcagtaaagaatatgttgattgatactccctccgtcccaaaaagactcgattcctgggttttcgtatccaacgtttgactacccgtcttatataaattttttttatgattagtatttttattgttgttagatgataaaatatgaataatattttatgcgtgacttatctttttaaatttttttcataattttttcaaataagacggatgatcaaacgttggacacgaaaacccagtaattaagttattttgggacggagggagtatgttccctagcttcacgagtcagagctctactttcatctactagtagtcatgattcttgattttttataaagaaaatcaggaagaaccaaacacagaaacacatttttttaatcaggaaataggttcagtagatatttgtcagtacatgaggaggaaattttgggggaccacaaaagcagctaactatttcatttttactgaataaccagactgataatatttactacagatcaaatcatcgaactaattctcaacaatttttgcagtgttccaactagtagtagatgatgctgtgatagaattgtgagtgagaatcattaattgtgctccagttgataacttgatatactagtacgtaccatctatctccagatgaagcaaatcacaaagacacaacctgatcaagcataattgagatggaaaccaaacaaggtagcgcctatagaaactttcgctggttttttggtggaaacactttcaaatgaaatagcaacatttgctgaatcacagctgatcacatccatcaagactgttaacttcactgaaagaaaaccatatgaacagcaacaaaattctgaatcttcgtgtttgcatcaccaacagcatcagcagcatttgcatttccttgagaaggaaggagaaaaaaatagatatgctagactggttcagtaaacatttcccagctttcttggactctagcctacttcagtaaacatttccaccttttgtggattcatgcacgtcgtgctgcatcccccgggcattcggtacaactactatgcgcatttccggtgtaacaacgctacagcagtattatctgtggccttgtgattggatccaggttgccgggctcgccttttccgcccctataaaacgctcctcgcgttccccctgtctccccacagcgatctctccgaacgaacacacagggtagcgctcgcgtagtcgcgtactccccggcctgctcctcacacagacgcg

SEQ ID NO: 6670 - DNA, 2000 bp, Oryza sativa
actataagaaaccactcaaatgcggccccaatagtaaccgaagtagggaccaccaccacctcccctccacacctccacgcaaaccacagggccccacacttcagcctctcacaagtcactaaaccacccgtagaaacgaacagatgacaagaaatcgccgggcaactaccgagtcgggggaaacttaccaaaacaacccaaaaaccttccaaaaccttttctttttccacttattttaatcaaaccaacgcaggaaagtcagcaccggggaggcgactgcaaaaaagccaaaaccgaggtcgcgtgcatgcgaagcttcctcgaagccgcacgacgcggcgaggggaagggggaggggcctgaaagcaaaagagccgatctcctgggcccactcgtcagcctctcggccgggcccggaagtaaaaagagccgattccgtggggcccactcgtcagcctctcggcccagcaccagcgcacgccaccgcgtctggggggggtataaaagagcccccatcacagcgacgcgagcggttgcttcctccgaaaatcctcatcctctccattgaccagacggcggcgcaggcgcaggcgctcacctccctcctcctccgcggcatccccaaatcgaccaagctggctcccctgccttcttccgcgtaagttcaccccggatctctctctcgaatcccttgctccgatctccaatccgcgcttggttctgtgcgggtttttggattagggcgcggttagcgtcgggggatgtcttggggttggggggtagggttggtggctatttgggggtttggttcgacgattcggggatgggggttgatggatttgtgtggatcggattggtctcgtcgataggttcggggtcgcggatcagggtggtggatgtgatgcaggttttgtgtgagatcgatttgatcgtcgattttggggcctaatttaggattggattgcttggagagcattggtttgtgcagcgttgacttaggtacggtttttttggttaggttgattgggggttccgtttgatcgttgacctgtggtttaggacagatctggaattctccaggttcaattgaagggaagattatctcttttggggggatttcaccgggaaatatcaatcaaccaaaaactagttgtgatttccttgttgtaacatacgtattcgatattcagttttccttctatttcgggtttcctccgaaaattaaagtagtagctgcctattttctttgtttggacatgctcatgagggtttatcaagggtttagaatgtcatattttaggaaaacctgtaccttctgctttatatgaccattcatgtttcttatgtctgtcttattttacttgcaggattttgatcctaatcacccatgtctgctgaagtcagcgaggaatatccttatttcctctcctgctacttctggttcatatattgcataaaattccgagatttcacttgatacaagtggatcacctggagttttgtgctaatacttcctatcatgtgaatcagttgtagttagcataattggcaagactcaagttttctctcatctgggttcagaaacatttgtcggttgagtgctcgatctaaactctgcttgagtcttgccgaagattgtttctcaacaatcacgtcttctgttctctctgaggttggaccaatctcccttttggtctgatcaacctcctgatctcccttaagtgaaccgtcctgctgtgttcacgcaatacaatcttctgaagtcctctcttgttccttctgtgctcaaacatcaaaagcagctctctcctaagttctcttgattgtttgtgctcctaaattctgttgtttgagcactcaaacatttcccttactggtcaatcttagatcacttgttgattattggtattggcattatttggtgaagcatttctgcttgtaccttaaacaaaggtctctgttgtcttattggtgctgaaggcaagatatacactgcagtg

SEQ ID NO: 6671 - DNA, 2000 bp, Oryza sativa
tagccagtcgatggtcgacgtggatactctaatatgatgtaattatattatattgggtaggagcgccgtaattagtgttatggggacataggtgttttagctgaacctcattaataaatattgtgcttatcggtatcgtcatcatattaggaccctctatgatgttcttctgcgtttggttaccgatgtgctatggggttggttttataacaagtggtaccagagcttgtgggagatgtatatatagaggcacgagagatgagtcccacaccacaacactttgtatatgttgtcttgggagggacatgatgcaaggttggagcacggcaacgattaacggaaattgttcggtggaatcgaacacttctagcaatggtttaaccattcgatggatacttttaattgggaggcgactggacatggtgctcgatttaaaggtggcggacgcgattggcgatccaataggtgaagaagaaggcatgataatttgttggactaaattgatggcggttaatcgaaaattggagcgcgggtgaaacctttcctaagggaaaggtgccgacaacaggacgaactgccgcaaaactgatacacatgggcatggcaagtacggaacaattagaatgatgggcgtaggtcggacttaaatgcacagattgtttggattgggcacagggaaatgtgcatcctgctatgggccatgacgtgcacatatgtgcatgttgggccatcatttgcgcatgcagcacatgcataacaattaacatggggcattacacgcatacggcagggaagcacaaacgtgtggagcctcagtttgcacacacacgcgcgcgtccctctgatcaggccgacaacggagattggaaggccgtacgtgcatgtttggtgtagctggtatcttggagagttggaggtgccgagatcacggaggactcgatcttggccgggttggcgcgcttgcggtgcagaggctacggactcgtccgctcgtgtcctctatcacagcgcacggggcacggagaggtggatcgactcaaagttcaactcgaacacgagaagggccagcgatcgatcgttactccatggtgtgatgtgagttcgatcatcggcctatacgatcagcaaagaacgggattgcaaatcatcaagcaaatagtacaaggattgtgaaatcatggtttaatagaaaaaaataaagcttcctataagtgaaatgaagaagtaattttgacattagtgctaataacaatcaattgtacagatttttttgtaaagtatataaggagaaatttgaatacccttagaaaggatgattttgggctcaagaatgcttgtttttacacaaataatatcacaaaacacataatatagctatgaaatcataagttccaaaaaattggggtacaactatagctcatgtttcattggcacacccatggtttctaaggaacacccgtaatcagtgtcccgagatataaattttagcacaatctcattagtaaatatcatatctcgatgtggttaattatcttggtgaatacttatgacgtattttcgtgtttagttaccgatgttctataatagctcgcatgaggttggaagtaatcaggcaacaaaattagtgttcttcaagcaagaatggttgtcagtttatctcactatgtgaagatcgatctgtgaaactaaaatgagacttaacattaactccaaatagttgcccttcatgattgatgatgagtctagctacgtactgtactgcccaggctgacagctgagcggtcacaatcaaactagcaatcaccaccaattccgtgcagacgtggacgaagatgaaaaaactcgagctcgctagcgaagtccattccgactcgccagccgtctataaaaggcaggcgttacgcgctatcgtcccatctcgaaatcaagcacgaggactcccaagtccagccatgaaagccacgacgacagcagtggccctcctcgtggccgccgcggcc

SEQ ID NO: 6672 - DNA, 2000 bp, Oryza sativa
tgtacgtaacagtaacaaatgcaaggagaaaacaatacaagtctaattgacagaacaacaatcattgcctaaagggaaaaaggagaatacaaggtgtagttgagtaacatcaacaaatgcatggaaatgacaaatcatttatgcaagagaaacagcatttcgaagataagatccaaccccaaaaaactaacaatgattttgccgccatgaatttgtgataatgcaatgaaagcccaattgcatcagactgttgcgtggtcaacccaaccatcattgccgattccacaagttgtgggcaactcactccatatattttgttaaagaattatccacgtgcaaggtctagctggacaaccatctctgcaactgcaactggctaactggtcagtggtcacttgctccaccctaaaatacgtactccctccgtccaaaaaaagacaaaccctggtttccgtgtctaatgtttaatcgtccgtcttatttgaaaaaattatgaaaaaaaattaaaaagataagtcacgcataaagcataaagtattaatcatgttttatcatctaacaacaatgaaaatactaattataaaaaaatttcatataaaacggacagtcaaacattgacacggaaactcagggtttacctttttttggaacggagggagtagaatagtgctccctccgtcctataaaaatgaatctaggatcggatgtgacatgtgctagtacaatgaatctggacatatgtatgtctagattcatagtactaggatatgtcacatctgatactaggttgggtttttataggacggagtgcgtatatatcaatctatatcggattagacacattcactccaatcaaaatcgatttgaatcacttttttttttcattacactatttcgattagacatatttagcactataagaccctgtttggatccactgacaaatttttacaccatgtcacatcaaatgtttggacacatgtatagagtattaaatatagatgaaaaaataactaattacacatattgcgtataaatcgcgagacgaatcttttaatcctaattgcgccatgatttgacaatgtggtgctacattaaatatttgctaatgatagattaattaggcttaataaatttgtctagcggtttatagcagtttataggcagattccgtaatttgttttgttattagattacgtttaatacttcaaatgtgtgtccgtatatccgatgtgacacgctaaaactttacacccttagatctaaacacagcgtaaatcccggtcaaattcatagctttagaatgtatataatctgaaagcatattattatattttgggacgaaaaaagtattagacaagagtgatgctctggtactctttactggttactaccagtatcgtcagaggtaaattagtaatttacaattataatgattagaatttattttatcatttatatttttttggctaaatcaatatatgatcatccattgtgttggcgttgctcatgcttcatcgaaaaagccaaaaaatgagaaaaaaagtagtcattgctaaatgatgattataccctcgatcaccacctacttttttttgatagtaatgtcccttcacgtttctactaccgctaaccgtggtggttgtataaatagatttgaacccttcgattaataaaaataacggttcaggttgatttctactaccagtagagagcaccgtagtgaggctcatttagacaatatgcacagctccatcccaaaatataagtatttttagctatgaatctggataactgtgtgttcaaatttataaccaaaagttattacattttgggacggaggtagtaatttatagtcacatacagtatccactgccttgccctgaaccctataaaacaccctgctgttctgccattccaaagcgccatttcctctcgcttgcaatctcaccattaacaggctgtaccaggaagcatccatttcgatcgcaagaagaata

SEQ ID NO: 6673 - DNA, 2000 bp, Oryza sativa
atccacacatacaaataagcatagccacataggtaacctctattgaccgtaatttttcgtgcagtagtcgttattgaatgccacctcccgttcttgaaggcaagtgacgattagataatgacaccattctaaatatcacgtactatttcacactaatgctacggttctagacactcgtgagaactcgtttaaaggaaaaaataaaaactatgcaaatatatcagtaccattctgaatatttcataatccatggtgcatttatattttcgttcccttatcattgctataaactaaggtgtaagatatacaataagttgccgttaacacacaagcctcaataactctctaagactctctcatgtttttagtgaagtttgtgtatagattatccctgtacgaagaatggctcatttcctcctctttcatctctttcacattattaaaacaattggagtatatgaatatgatcatagtatccgtttgttatactagataggattatatttcatctatatctctagacttacttaagaaccaaatcttgtactcatatatatatatcggctctcaagactcaatacaatatgtcaatatttgcagtaatttcttccccatttactatttagcaaatgtctatatgacatctaaaatcaagtgtttaagattgcttactctataaacaccatatattccacgctaattttaattttctagacactcgtacgtaaagtgaccttaggtaaagagaaaaacctaaacaaatataccgttttgaatagtactctttccgtcctataaaaaaccaacctagtattaaatgcagaaaacctagacaacggtatttcgttggaacgggatactcttctatgagacagtacctgatatctgatacctattgtgataccagctgcatgatacttgatacctgtgatacctgttacccggtatctgtgatatctaggacctgatacctgtgatactcgtgcaagagaatagttaatatgtctatcccattgcaacgggatcccgttttgtagcagctctctgttgaatgtgatacgttctagtactacgaatctacatatcgtaggtttttttttatcgggatggagggagtattttacattcccattcccgggttggcgcgattcccatcctcccctgctctactgccctggaaagagagagagagatgggtgcgtcctctctataaatccacctcgtgttgctgctcccacaccccccctcctcgatcatctcctcctccctaccaacaaccaccaccatcctcttcttggcacttggcatcaagagacacatccagacgcctcgagttgtagctagcaccagtggctcagcttgcccagtgctgctgcatcgatcagtggcagtagctagctcagctctagccttttgccaccgaccgctccgatcgaatccggtgctaggctagccagcctcctcgctctttataaccccagccgccattggagagggagggagggagctagagctttgttcttgttcttgcatgctgttcttgttgatcgagtgagagagggggaaggaagaaaggagggaggcacatgcttataccgttcgtgctggagttcctgatcgatgtcgcctgtgatcagtgagatcctcctctcggggtttatgatcaactccacactccggcgccgcacccatctcgtccagtctttctccgtcgtcttcctctactggttctatgtcttctcataagctactcgccatccatttccctctcctcctctctctctagcttccttctacaataatcgatctcgtgttcgtcgtcgtcgttcttgtcgatctctgtgtgtgttcttcgtcgtcgtcgtgttcgttttggattttggtttcagtttagtatatgcacttcttgttcttcactgctgctgctgctgctaagcttgtagcaatctagtggtgcttgttgttcttcttctcccgaaatctttgcgatcgattgattg

SEQ ID NO: 6674 - DNA, 1874 bp, Oryza sativa
tcccgactccaacaagtagattgaagagttcttgatgtagaatactccttctagttttgcattatttgcatggacaacatataaaacccttaggcttgtgggcattggccacactaaaaaaaataagagtaaagtatacgagcggtcctttaaacttgtagggatttgtcatctaggtccctaaactctcaaaatgcatatccaaatcccaaaacttgtcatagtgtatcatctaggacccaaatcgccacaaccccttcaggatcctacgtgctgttgatgtggcatgccatacggacatgacatagcattattttgactgacattttttcttttttctttttttcttctcttttttcccctttcttctcctttctctgtgacccgtgcagaaaaaaaaagggaaaaaagaagaatgagaagaaaacgaaaaagaaaaagaaaagaagaagaaaaaagaaaaggacgcatcacgtccatgtggcattgccacatcagcgccacgtaggatcctagaggggatgtgtcaatttgggacctagatgatatattttaacaagctctgagacctggaaatgcattttgagagtttagggacctatatgacacaaccctacaagtttaagrmcsscmaactgyactytactcaaaaaataatgcacgctatcaataaaaccattaggcttgtgggtattggccacgctcaaaaaataatgcacgccattaccgattcatctacatgaggaaataccaaatgcaaaggaagtctatgaaagtgaaactacttaaatagttatataataaattaaaacatcataattaaactgaaaactgatggtacacatttttaatgtattctttttatttctaatgattttaacgagttttaagtgcacttaattggagtcatagttaattatgtataaattttatctgtctcaagaaattgtaaatatatttttccatgtattatccttattttaattattttttaaagttctagacatatatttaatgcattctacttatttctaactattttaatgattttcaaatggacttagttttcgattatttttttcttcattttctatatttttcgtttgttgtttttttaacaaatttatacaaatgtttctaattttatgaagtacactaattttccccaaagaaaattttatctctcatcttttttccatatatgttattgagataataatgcatacaaacatagcaagaaatgtaaaatgttaactatgcatcaatagaggatgacgttgctaacctttagatctctttgatttgtataatatcaaaatattttcacaaaaaattttggcagcacctctctttctcctcctttcactagtagcaatggctcgggctggaggaggaagaagagcataaaaaggcaatgatctttagtactcgtttgtgtcatcaaccggtactaaaatgtcgatctttagtactggttgttgccacaaaccggtgctaaatatcctgggaggcttgatatgctctgacaaagtgtgaatcaggactaaagatagcaatgtgtcgttgggtgttttaaccggtgctaaagaggtctttagcactggtccgttaaacatctgagatatttgttgttttgccgattgagcaaagatcggttgtctagtagtgtataatccactgccactgttaccttttccatacatcttgtaaatcaatatcaacaaaaatgtaattacttagcatatattaattgtttacacatttcatagttatgcattaataatacatagctagccagctttctaatggcggcacaatatatagtgtatctcatattggtaaccatttgctgtgtacagaaatcactggagtgg

SEQ ID NO: 6675 - DNA, 2000 bp, Oryza sativa
  misc_feature (1)...(2000): n = A,T,C or G
tgtggaactgctctaccaactctgttcaaaaaataaagaatttgtaccgtttagtatagctccagctctatataaattggagttgggagctggagctgggccaaacggagccttaaggggtaaagatttgtggatgtcaaacaatctcggcttaaaagtggaggcacggcgagtgaacgtccgccgtgtttgccccctcgcgtatcctttcctctttcttgctgccgtatcgaaacaacgtacgctcttccttaacataacaacaaaatgacaagctacttaacaacagcgaaaaagaaaaacagggccaggagaaataataggcactggaacgaaaagaaaaatggacctatttttttctcacaacactggtttatcactattgtaatagtattctcttcattttaaagttgatgatggcagttatggctgtcatctaagctatttgaaagactagaaataaagcttttgataatatccttcctaaagaatctattgaggtgattttcatgatctataacctgatcgaatcttgggctattttgcaaaattggaggcaaaccggagaaagttggagctgggggcagggtggtaaagcaagtggcaagccatgttttcagctcaagatatggttggcgaccttgtgctagaagattggaatgaagctgctggttgtgtgcttttgcctgaaaaatctgttgcctcttgggctgctctcccagtctcactactctcgttttctctgcgttctagtttctgttaggacagtgataaaattttactcagtcttctctccagctcttcctgctggcttttgtgagagtaggatgctcagctttgttgggcacatctctgttagctccatttttttcttcctttttctatttgtttataatgacttcgtaattccgttccattaatgaaaagggggcctcgagctctagttaaaataaagattaacaacatcttatattaagaatttaaaaagaaggtaatataattttgtccgcgttatcaaaacgaaatgctgattatcttagacaggagcgaaaagaaaaatcaaatcgcaagcgactttagaaaaaaaaatggtagaggaaaaaaaaaaaggaayccggataatggaycggggatttnamcccgacktgaatcgaacacgcaaccttctgatctggagtcaaacscgctaccwttgccccacggatccggtcgtgcccmctggtaacgawtcaacwttttttagtactacctccgtcccaaaawtttasctatttctaacmcagtactttgtcycaaaatgaacctwtttttctacctaccttctcctctmaaccawtcmcaawtatcctttttcmcctactttcccttttcaaccawtcacacacctttttcaatcattcttatcwactttctwaatacccgtgtcaatttaaaaaatgcttatattttaggacggaggaagtatatgcgaaagtgcaaaccgagcactccaacttatagactcgtccggtactacccaaatagtgccaatacaacacagcccccacttggcacttgggcagcacacgagtaaatactaaaacgccgtcccaatccatcgccaacacgaatcccaaccaaaagctcacaaaaaagcgacgaaaacgaaacactaaacaaataatccgaataaatcaaacaaaaacaaaacaaaaaaaacttgaggctctcagaagctttccccgccacgtgggccccacccacctcttaagcacccaatgcctaccagccacgtcggatcgcctcatcctccgtgcccctcccacgtgtctcctctcccaccacctctctccccctcgctttggcctcttcccgcttcctcgcctcgtcggcttcgcctctcctctccaccactccctccctcctccgcttcctcctctcgcagtctcgcttctcgccgccgccgccgcgcacacgcggcgcgcccaaaccctagtccctccctcgccgccgccctcgcg

SEQ ID NO: 6676 - DNA, 2000 bp, Oryza sativa
gtggtatcgggtgatcctcatcgatttttttgggtagtatcaaaatatagctaaattatgtaactattgttaaggatttgctactgattacaagtatgcgttagccgtttcttggagacacggaatttttggaacataggaaatcatgaatatggaaaaattgtaaaatttcagtgccttagcatcttgaatcccgtgaatgaaaaaaagcataaaaaatacaggaataactgtttaattggagcacggaaaaacaaaagatatcttttaacatgttgaatctcatgttaaaaatccttcaaaattttaacaagtgaatgcgattcttatgtattacaataaggagagttgtttcttcgttccacttaactatatagaattctttttcgtaggaatctgattattcaaaatctaaaccatatttaagtagtatgtatgggaccatcgatttcaattgatgtttccaccttataagttaggattaaatttttttctacgactaactttttatgatatgttagttcgcaaaatatttttctactcccagtgaaatccatactttcgtactacttaagtggtgattattactattctacgagagatgtgaatgtgactaacatattacactttatagtgcttccccacatgaccactctgctcatgtttcatcactgttgctcctatcctaatgacatgccttagttcttaacgtctggcattggctatgctacacaagatgcttattgtacctccaacatctatctatgctatctttgttctttattaccgttggttgccgccttgtatgactttactattctgatttttgttgctgggatttttcaaaaaagatatgtgtcattctaatgtctttatcatgtcctacatattatctagccaatggcttcgatgatgtcacagctcttaccacagactttttcttatccctactccctagtattgttgtgttattcctcttctattatttgacaaaaacttgctttggttgcgattaccattgtcgaagaagatgggtttgtgaacaagacgcaaaaaaaatacaagtgctgatgtctagatagcagtggcacatgtacgtatgtttgatgtcacataaatacggtaaaatctatgacaattgagcacgttacaccatccacgcggcaagacaatcaagccaaatgttcaattgatggctacgtcgcttttgtcaactccttattttccgggctataccgctttgaaataacttagccaccacttttaaatatctctcttcttatttatatgggtcccacaaatcggtaacagtcgtcttcctcatcgcacccatcttcaatctcgataccgtcttgttaggtagccattactcgatattcaggtctgctaacgaaatcaaaagagaggaagctatgactccataaggtaccaatgatattatccttgctgccacatcctcgttcgtctcataggaatttctatgctaactctaatatgattctctcatttctatcaccgtaatcagaagagcgtttataacaccattctttattcatccatggtagagctctgtattgccgttgcttttatttaaaagatatttttccctatgttttgtgacatgctacgaaaaatcccagaaccaaaccactaggaagaacgcattagaaattcctttgatttcgacactatcacacggtatagagaaaaaaaaaacgggagaaacaatgctcccggaaaatggaagtagggccagcgacggggaggcgaagaagcaaacacaagacaggcagacagcacagtggagaggagtgtggctgcgtgcgtccgctccgctcttgcgttgcgcctccttcctcctcccctccgctcctcgcttcagatccaaaccctcctctaaaaaaaggggaaaagccaccaaaaccctaaccctaagcatcccaatccccaaatccccccgaaaaccctaaccggatcccccttcccctcccgccgccgcc

SEQ ID NO: 6677 - DNA, 2000 bp, Oryza sativa
gaaaaaaacaaaaaagtacccatagagaaaaactaaaaaacactttgagcaccattgacccataaacatataaaatcattgacccatcatctcccgatggacatgtccttggttagcggaaaattagcaagtattcccttcgtttcagattacaaaattgctttaaatttgactaaatttatagaaaaaatagtaacatttttaacccataacaaaattattatgaaaatatattcaattattgatttgatgaaactaatttggtattataaatattactacatccatattttaatgtataacgccgttgactttttttccaacatttaaccattcgtcttataaaaaaattatataattatcatttattttattatgacttgattcgttatcaaatgttctttaagcatgacagaaatatttttatatttgcacaagaattttgaataaaacgaatggtcaaacattggtcaaaaagttaacggcgtcatacattacaatacggagggagtactatatttgtctataaatttagtcaaacttaaaacaatttaactttaatcaaagtcaaaatgtcttataacttgaaacagggtgagtagtaagattttatcgttgtctagtttttatattagtgtaatcaaacaataattttaaaatttcctatgaattcactccacacataatttaaacgacgcatgacctacggggctgtttggttggtggcctcagtttgccacaccaaactttaagcgtgccacaattttttagactagtgtttggttgcgtgccgcagttgagtcaagccacactttattaacacattggcccaagcgtcatactctcatttgctagccaaagtttgccatagttatggttaacaaattgttggccacactttgtgtggcttgccacaattatagtaaatagagttatggcaaagttagcctccatccaaacagcgtttccaaggaacccaactccaaagaatctagtcaaagataccacaacccgaaaacaaaaataacccatttcaaaaggggcgacttgtaatttgtagcagtggtaagaaataaatctgacctttttcttttcatcagatttgttttactacctccaagaagctctctctccgtttttcttctcttcctactaaacccctcaaaacggaaagraaaaaaggaggaaaaaaaactcgaccaccacttccaccamtcamacctcgatccggccatggcggcctagccctagcacctagggttcgcgcccccaacaacctycccgccgtctcggagaccgcgcgcccccagctcccgcctcgctgtcgcgccgcctgattccgccgccggcgccgaatgctacgccgtttggtggtggtggtggtcgtcgtcgcctgattccgcgatctcgtgagctccggggggtgcgcggttgcggcggcggcgcctgagaggaaggctggactcgtccgcggcggcggcggctgcgggctagtgtcggtggcgatttgagggcggcggtttgggttagccgtcgccgagagtgaaggtgctgtgttttgagtgcttgggatgagctgcgtgttgatctgatgaactcggggtcggcggcgttcttcggtttctccgctcacttgctcccgccgttggcgaaaatccggttcttcggatcgagttgcggtcgcctgggtgtttttcatcagttttgggtgaaaatactcgagctctgaggggggtgattggtttccaagtttgattgatttaaagagtttgtgtggaattttttcggggagatgaaggggaggatttgctgcgacggtccaggttttggttagttgttgagggagaaaaaaatggaagatatttctgggcgcaagagaggaaggcaggtgtttgctgctgctgctgggagcatgatgggaagctgaccagcagcttctccggtatcctggtgcggcggagtttcgtgctctttggcgacgggtgcactggtgattggag

SEQ ID NO: 6678 - DNA, 2000 bp, Oryza sativa
tatcacaagacagaacaatcagtacttacaaattgacacctttaaattctgaagaagaagcatatgttgtttttaattctgaggatacaacagtatcatgttcttgcaggatgtatgagtgcacaggtatgctaccatattggttatgtttccaaaacgtaaaagtttgattttcttgctataatcggagattgcatgtttttgtaggtatgctatgcaagcacgcgctgcgagtccttaactacagcaatatttttacattcccctcacactatgtttacaaaaggtggacaaaatatgcaaaagccggactatttggctgcagaaacaattcccaaagcggcaatggaagttcgatgttaagatgtgcgcgtatatctcaaaagatgcactcagttgctctaagatattcgatgtcagaaaaggcgcttcagtttttggaaagtggggtagataagttgacatgtgaagtagaaaatttacttagtcacataaacttaaatggaaatggaaatgataccggtcaatcttctggtttttgcaatgggcaatggcagaaagtttaggccattcagaatcaatgtacagcgaaggggcctaaccgcctaacctgcaaaaatactagaaaaaagtgttctcaaggaggaaaatggaaatgcactgctagaaggagaggcacctacaatcaactgttattttctgttaatgtaaattcaaatctcagttcttaactgtgtgaggcactactccaaaaaggaaaaaaaattcaaagagaatcatgttggtctcatcatagatagagggcatccaattctctagttgctgtagttctcttaactttttctcctctttgttcagggatgaatcatacataattctgggcatatcatcagctctccatctacttggagttaacttcctaccacttccgtcttcgtccaaagcgaggcagagtccataaaactctagttcggtgatttgccgatgttgtttcgccatctgcgtttgaactgctgtgcttaatttggtgatccgctagaaatgcactcaaaatatagcagcgtaggatagttctaaaaatgtccgatatgttatattttaggacgaagagtacatgtaaggaacaagtgcgtaggagcagtaacttgtttaggagtagctctgcacaatgaaaatagtattctggttctctgttgcctttctgcctatatacagtactccctcggttttttaataggtgatgtcattgagttttaaacatacgtttcagtttcatcattcgttttacttaaaaattttatgcaaatcatgcttaaaagactttaagtgataaaacaactcacaacaaaataaattgtaattacgtaaattttttgaataccacaaatggtcaaacatgtgacttttgaaaaaagtcaacggtgtcatttattaaaaaaatctgagagagtatttatttatcttccaaaatgtgcaatgtgttagtttcgaattgagatccactgcagtcctaactgtggctgcgagttaggaactgcacatcatctcagtcatccatttttccagtgaacggtctagatctgatgctatagtgctgctgctacagtagttctgcagtttttttcagatgtgaacagtactttgtagattctagacccttggatttgcatcaaaagttcctagtgtgactgctcacactaggtgttgcaccggatccaaatccgttagtttctgttggctatcaaggtcgctgttgaccagagtctgccgctgcgtgccctcagcctaggtgcagctcgcgccgttggatcacttggtcgaagcgtgtccgtgtgccacgtcatcgtgtacaccacaccacaccagcttcgagctctgattggttggctgacgtgtccgtctccacgcctatttattcgctcttcccgcgcgcgtcccgcccggcgacggcgacctcaccggcgtcgacgtcaccggccgacgacgacgagacttcagcg

SEQ ID NO: 6679 - DNA, 2000 bp, Oryza sativa
cagccgatcttacctgatttaactactttttatcctatatacttgattgacatgttaaatctgccatttatgttaagatcttactgtatttaagtatattaggcttttgtttagtatattctacttgctttaatatcttaatatagagtggtatcggagtattagccgatacatgctagatctatctgatcagctatgctatgaacgtatatagtctcattattaatatatatttcgatctaagtgatttatactgtttcggcatggcgaccgatctaacccaatcacttgatttaagtatatatcgatataaggactacatattgttaatatctacagccgactgagtagatttagttcttcttacttattcatgactgccgatcgatgcatatatgacatcggctcaatgataaatgatatgttatcggcacctagccgatcggctatcgtttatggatttaaccacggtttcttgtatttgtttcttgttgattgcaggatcaaatcaactggcactctcatacacccgaaggcgagttttggacctgcactggagttaagcagatctcccaggcctcgtgttttacatcaacaagagtttattgcatttttaatctctaagagcaggtaaaatagcaggctataagccagctgcaaatatattttaaggagataaatgaggagagagaagagcagcgggctacatatttgtagccagctgtagcacggactccaagacgcagtgtgcgtatgacatgtgggaccatgtattaatagtgtagtatgtaaccattgtatgaatgagctattagattggctatagatgaattggagctagtagttggctatactattaaacatttaaacttgctctaagactctgtttagatgagactaaaattttaagtttctatcccatcgaatgtttggacactaattataaatattaaatatagactattaataaaacccatgcataatcatggactaattcacgaaacgaacctattgagcctaattaatccatgattagcctatatgatgctacagtaaacattttctaattatggattaattaggcttaaaaaatttgtcttgcaaattagctttcatttatatgtaattagttttgtaagtagtctatatttaatactttaaattagtgtctagataaagggaccaaagttaagtctctgggtccaaacaccacctaagtaatgctgatacgtgggccaccagtcggcagtcatagtaaaaaaaataaaaaggtggtgtatagtcgagtatctcccctcttccccctggcgtaaaagaaaaatctcccgtctcgtcgtcgcctccgctccttgcgccatctcgcggcgccgatctccttctggcgagccgagcagagcagaccagggcaggggagcggaggggatcctaggtgagcatccacatcctcttcctgattcatctctctccctcccaccgggagtacttctgtctggagtttgctcgcgttctttaatcctagcttctcttctagatctggaagaagctcttctgttaagttctgagcctttaaccttaatacaagtgacagtttgtgtttgttcagttgaatccgcccctgatacatttagtacaaaagaactgttttgcatcatgaactcattgtcttccttccttccaaccagtatgaacgattcggctagaactcactgttgtcgggatgtcaagtgcgagctgtttcctttttgcaactttatttatgtagattaggatgcgtttatgcatgcggaatcttggacatgtctaagcaatttctttactttcacgataggtgttgcagtttcttttctcgtggacggtctaaaggtggtgaagaggctgtacagatcacgatcccgcaagtgaggtttgaggatgatgaactaaagggcttgtccgagctactgcggcaggagatctgataaaaccagtcaagaggcgagtctcagaggtgctaggacgag

SEQ ID NO: 6680 - DNA, 2000 bp, Oryza sativa
gtgttatgcatcctcctgtctcgaaacaaaaatcttcgatgcaatcgaggagggttcaatcagctggaatggtcgattttgtttgcactgcttgttgcattccgtttgcaaacctaaagttttgtccatacgtacatagcagtggacttgcacattagaatttagagccaaggttttactagtttttaacttaggacttaattaacttcaaagttagttcaaggctgcggccagtattacatttttccaacattttctttctctttttccatgtgcacgcttctcataccactaaagagtgtttttttttctagaaactttatgcaaataaagttactttaaaaatcatattaatttatttttaaattttttaatacctaattaatttatacgctaattcaccgttctatttcacttgctggttgccaaacactttaaaagaacacaactgtcttcgtatattttctctcttatgtttgcctttaaagtagctcaaagtagatgtgtagtaaaagttataacacgataaactcagtgctcgcgatgcacctctttatcatcgaatttgtatgatattttggcatttatctcttttaagcgtgtattgaaggctgcactcgtgtgcgttagtgtgtagtacgagcgtagcttttgtgtttagtgcgatcagcgttaattacggcacttaatctcgagattaccctcacgaaaccaagccaaacaaacaaacaaacaacggtagaagcgaactccccgggtgggtgggccccacggcgattccacgccggcgacgtgtgcgctgcctctgcgcaccgacccccggcccttcccgtcacatttccacaaaaaccaagggcttaaacgaaaaaaacccctgatatttcgttttcttggagtttggaccaaaaccgaaactgcaaaagcgcgggcgggagcgaaactttggcgaatttacacctaagcccctaggaattccggtaatttaccaagtgcccccccgcctctcggatacttgtgcgcgtttcggtttctcccccctttcttctctgcctcttctgctgctgctgcttctgctccagtgtctggttggcttccactcctcgcgcgcgctcgtagcccgcattggtggaggcggcggaggggctcggatccggctgccgcggcggggggaggtgagggagatgggaggcgagccggcccccccgtggctgcgcgatgtgttgatttcattttttttgggcatttttgttctggattttgttttgaactccatttcggatcgattcgagtttggagagggtgtatgtgtgtgtatttgtgcgcgtgtgggtgggatttctccggtgctcgtagtgtggcggtggcggtgggttctcgcggaatgcggtggggtttatgtgctggatggtgctagggttttacgagcatttttgggggatttttcgggtgtggttttgatcctctgtgatgaattctgatccgtggtgagtttgcctgtgggtttgaccgacgactttgctggaattttggttttgaattccgacccaaaacgatgggttcctgctctgtttctacatttgacaaaaaaaattatgatgaaataaattttttgtgcttattttgtcaagttttaatgcttcgcttttttgtacgggccatatccaccggcttcgtgcttccgcaattccgtctgatttggtaccgcctcgcgttgtacttccctatctaggcgttgacgaattctgcgagcaattcaaaaattctgtacaagcgttgttggttgctcagttttcgtatgaggctgcaaattctgagaatttttcctttgcatcgaacttttggtgatttcccaaatatttgtaagtgctacattgataatttggtttgtttacctggctatccaggtcaggcatgtgtgcaatcgtcaagaggttcctggtttgactagaaagcaaagactggcggtgtacggcttgaggttttgattgtggttgtcagga

SEQ ID NO: 6681 - DNA, 2000 bp, Oryza sativa
taatagtacatggctaatacatttcctagccgtagggagggtaactatcgtaatcaaagtatcaaacgatcaaaccttaccggccagtagttactgcgtactcctgtacatcaatgcagtcaaagtgtcaaactccattctttcgggaaaagaaaaaagaagaggaaacctctcccaccacgcgtagggctccaaacgtgtgcatgcgctgtctttcgttctctctagagcacagagtcccgtgcagtcacgtagcggagaacgcaacagctgatctcactcgtgagccatgacaacaacgaccaatcaatcaatcaacccccgaaaacgcccatccaaacccgccgggagacgcatagatcgatcatcgaatgcctcctcctcgtcgtctttatgccggccaaagcaacccgatctcccgaaccttcctcctcaccactgtacctcactcactgcgtactcataaaaaaaatctaaaactgaatgtaacacattttattgcaataaatttagatagagatatccagatttgtagtaatagaatatattattcagtactcgttgatattttatgggatggagataatactttcttcgtctgaagcaatctgggcaatgaatcacggggtcatattctcttctagtataataaatctgtgcaatctttttattcgttgtactggaaggtttagttttttttaacagtggggtacaacacaaggtcacaaacactctgtttaagcaaaacccaacattaatgcaagtagatatgaacaggagagaaaattaagaagggggargggaggaaaaaaaacaaggggagctaaaacttaaaagtgcttggtggggccggccggattaggacgaaaagcaaagcagagagaaagcaagtgtaagagaggaaaggaggctagatcgagggagagagggaccgcccgcgatcgctacgcctcgcaagagcttgaaagcgtgcttgcctgccatttccagcttccatttcctcccccttccatctccatctccatctcccacctccgccacctcttctcccccctccctccacggcgagccacgacgaggtttcttctctcttcctcgcccattcctcctcctaatactaccactactagctcccgccggtggacgcgcccggcccgacctcgccgtcgcaacggtgctccagcgtgccagcggacagcggcgacccatccgcggcggcggcggcggcgagagagcacgcgtcggtgagcggtgagttcgcgcgcgcataccttgcattaccgtgctccccggtgggtgtgctcctcgctgttgcagtgcggcatggcttggcttctgcaaccgcggagctcgcgtcgcgtcgggaaagactcggttcttctcttcttcttcttcttcttcttattctttttctctctctccccgatctgcttccggtgggtggtgcgcggcggtgtgttcctgggacccgccggggatgatggggtgggggctcccgtgattcgggggggaggtggggtttccctgggcgctaaaatcccttcactgctgggaaatggtgggtgtgattgggtggccgcccgctcctgttcagattcttgatgagctgaagcccagcccgggtaccattcctggtcagagggatcggattcttgctgtttttggccgtgcttcttgattcggatggcctcaattcggtcccagctttggatgattctctgaccttcgggggggtttagattagatgagttcagatggatttgtgctgccttgttttttagtgtccagacaatgcaaaagtagttccttgttagcttgcagacagttcctggtcctaagaatcttttttccaatccaaaagctgatcttttcacgtctcttgctgcatgttctaaactcctctttgcatcctattccaggtcgtagagatgcggcagcgcacgaggtcgtagggagggggggttcggctctggttccactgcgaccattgtgaagggaag

SEQ ID NO: 6682 - DNA, 2000 bp, Oryza sativa
ttgtttcttgttggttgttttctttgtttcttgttggttgcaggatcaaaccaactggcacaccctgaacccgaaagcgatctctttggacctacactagagtaaagcaagtctctcaggccagcgcgtgttttccacgttgacactcgttggcgtgcggctagggaggagatcgagtaggatttcttcaggagtcgtagcagagatttcgagctcttggcggttagaggtgttaccaggcactacgatgtggctcccggagatggggtgcatcggggttggggtcaggcaagcagcatggagggcaacgtggagtttgttagagtttatgttgaatatgtgtacaatgtcgattacagtttaggaattggagttgtaataggtattagaaatagagtgagagtcggactttatcataggatctctcttaaatagagggacgaacctgttgtaaccgcatatggtgacttagcacagcgagatggtgtggctgccggcgacgtccgggcgtgagtcattgtaactctgatacattgtagtatgctggatcgcagatgagcacccacaatcagtgtcccgggtatgtaggcttcagctgaacctcgttaacaaatatcgtgcctcgtgtcatcatcgtgtttggatctcctatggcgtttcttccgcgtttggttgttgatggtgatttcaggccagttttataacatcctcgccttcactgtcgagattcagccgaattcggcgaggtagaggaagcgggtgaagggaggtcccattgcctctgccgccgtagtcaagttgctgcaccgatgtcgtcgagccgtcgtcgctgcctcccaaggccagatccggcgagccccaggttggatctggcgagcttagtggagtggagtcgcagccatcgccgccgtccgaggccagactcgacgaaccacgggctagatctggcaaggatgaggcggcgctagcattccgacgaggaaagttgaaggaaaaccgttgaaaggraaraggraggkttgcaccaacggtgggaggagaacggcggaggaggaaagggagakttgtgctggtgtaggaggagacgcggcggagggggagagagagagctacgtgccgacatttggagaaagcktracggggatgaccggacgaggatgggagggtgtatttatatttctttttctaattttcgggatgtttgatgtaaaatatgaggactaaaataggaaataatatgggttgacatgcaaaaactgaaacagctttagaactactgaacactatgaaaaaaactgatttgagacctatgactttatcatacatgatatcatgatactcctgtagtaatgtcttgccttatcaatggatgtcctctcagctgctttccggtctcctgcaacgagagtgttcacactgattaaggctattattttggagctcccctatatacggatggattaacatgtgataaattaagtattagctaacaaaacttaaaaatatattaatataatttttaagcaattttttataggaatttattttagaaaaatagcttgggaagtgtgcgctaaaaatgcaagaggtgagttggaaaaaagttatgtaaaactgagcctaagccgccggtttgtttggaacgggtaaactatgcaagaataaaaccccacctcccatcatcactgttttaacccaaagtgccaaacacatactgagagaccgctagtgctgggactgggaggagagcgcagaggaagaggaatactggaaagctgacgaaagaggcaaggaaaggaaggaagctagcacgcacatatccagccagcccaggattgcagattgctatccctcttattctcgcaaccacgctgatcccaaaccccattccgcctctctcggccggtctctcctcgcgggataggagaaagtcagcggcgggcgcgaggtcggtcgagtggagcggcggcaagaagagcgaggagatttaggagggggag

SEQ ID NO: 6683 - DNA, 2000 bp, Oryza sativa
gtgaggatggaacgttgatcgcctgcgaccagggaccgggggcsgggcgggcgcatcccattcccatgcgtttcccgtcctctcactctcctcagacccttctggggtgtaggcacgcacggatcgatcggtttggcaatggaacgtactactactactgctactcatcctgtaggctgtagcaaatcatgcaaaatgatccactgctactggcccctactgtagcaagtagtagtagtaccaattaacctcttgtcaagacttgtagtatctacctcaggaggccattttactttactgatattttttattcgcccttttctttttaaaaaaatacttatttggtcctaaaatataacaatctattactttctttacttcaaaatataggatgtaaccatcttttttttcataataaaaagacatgcatgtatacaattaactaatacatccaatttctctagattcatcttttttttattatagaaaaaccatctaccctcaacatccctaatcatattgagtgcatccattatatttattatggtaatccaaatgaggaattatatttatctttttatatggctgaatctctctttagtccgaatgtaactcaaattaatatcccgatcatacgaaaccgttattttatttgtttttcaagtgttgttcataatcaacgtggagtttactggagatcattgtcgtgtcaactgttgtttctatgcatcattctacttacaataaggccaagcgtgattcaacaaccacaacccagtaaattatgtgatacctgtatattgtgtgttgcgtttattacgctttgctttaagatattgatcagcatcattttgacttgaatttaaaaattttggtttttaagaatattttgtgaaatacatagtacaaaccctcatatatttttagggataatttaaacatatgttttaaaataattttcaaaaactacatatactttaacaaaattatcataaaacaacatatttaaaccatggtaacataaaactattgttactcgaaagcatacatttagtattatcttcataaaacaataaattttagatgtgctatccctatacctattaacatagtaaaattttaaaatgtgtaattctccgagaaaatcgatgctccgtgttgcgaggaaaaaaatgacactgaatatatagtttctatatacaattgcttaaatttatagctttctaataaatttgttcatttagttttgtgatactataaattaataaatctatctatagtctcataataattttactaaactatctgtagttttacaaaaaaaattattttatttgttttcttaaccatgatgagaagagagcttaaacagaaacggctaagcgcctgtttgaggggattttctagttgttgcagattttaccagaatctccagttctctcaaacagtccagattatcacccagattctgagaatctgtagttataaaatccaaaaaataaactacaacccagaagcaagaaaacccagcttttccatattctcataagctggataccgaccagcagatttttagaatcttaagcacccaatactgggccttaaataaacaactaaaattaaattctactagaattcaaatcagtttcgtttttttctaaaataaattggttgtctttttactacagcctggtagtataacttttctagaggaaaaaaaattcagtacactgaatatacactcccaagtccgcgtctcccctcctcagattagcgaagaaggttcgttaggctaatctcagcactaagccagccacacggcccctcccactctccccactgctgtcgtcttcctccccacctcctaatctcaccggagtagtagtataagacacacccctccccttccccaaacccccgctttgccgagcgccccgaccttatctcctttccccccaccacctccaagatatttccccacctccgccgccgccgccgcc

SEQ ID NO: 6684 - DNA, 2000 bp, Oryza sativa
aaatacaaactttactccttaagaaaataatcatttcagagtaactcaggctgttgtggtgaattgctcaattagaaaaaataaatgcctcgatgcattgcgtgcatactgtgtagcaaaccctcttgtgctaatggggaaagtcttgggcacttatcagcccatcttttttcaccgcaatgctcgtcaagctccttcaagaatattttcttctagttttcctgcctgtgttagcaactgatagtagatacagtcgataaatcttttctggaagcactatacccttcatttatatcgtattgatctctacaagtttgcactgtacttgtaatgttgtgagctcatatgaggagtaaaattaatttgggttccatccttctatgcaatgttgcaatgaagcaaaccttctacggttctacctgtcaacctgtgcttgtacttatacttctccagcatgaaaactgaaatatatccgcgccatataatagcgggtctgcttactagcatacagccccatccttcgatacaatgttgcaaccaagcaaaccatctacctgagcctgtgcatcaatacattgcattgatatcttcaactcttgtactgatatttttttctcatttttcagtgcagggttcattggcacaatacgaacgaaatgatgaggcgcctactgaatagtccataccaagtttgtaggkcatacactcgtgctgttcttcacgragrtwtacacaaacatatcaaacaaaccacaagcaaataggtgaaatcaccaaccttcccaatactgaggcagctagaaatcaacacttcagcagtgagtgtgagacagagctagtatcaagcagtactcatcaacataatgagccacttagccttacagattgtgttatttcccaaaaaataaaaagtgagatgaaagactcagatttgagtcccaagattgttttgtttttcagtaaatgggctgaatcatttgtctcctcaggcgttaattcgttatcccctgtacctcctacgccaccagtcttatgagtggattgacagttgcttgctcaaacatgttcctggaaggtatttattttacatctaatattttttatttggggttcagcgggcatttgttttgattgtttcttattactccctccgattataaatatttgatatttttgaacaagatttgatcaaacttttaaaactttgatcatcaataacatctcmaaatwmttascttaartatgaaacawatggtttwscgtaggtttgccttgaagaatactgtcatattatcataagatttttagatttttacaaactttttgtaacattagctgattgtctgctcgttgcaacggatcttaaataagaacattgtcaattgtcatacattttaaagccctaagtctatctaatcatcaaaccgttttgccatcaatttgcatatcacatcagttaatttctggaaatctatcacttggaattttgtatatactttgagctaaccacacatgtatagctttataaggaacagaaagttggtgataagggtgatggcagattcatcatatacccgcaccgcttatttaaaagtatactccagtatagataaaattgatatagatggtaaaagtttgaaagttgaattaaatctggcccaacacgcactcagggaagtacctgtacttcctacaagactttgcagcgtttcatccattgaaaagtcagttgggctgcaaggcttgcagctgtacaggatatggaattcttcaaagatttttgtactcactagtagaacacatggcccactgaatagtgggaccggtaaacgaagtatcatacatcgcacggtttttttcccgcgaccacagcgatcagccacaaaaacmaacgagtcaactttcacaaacaaagcgagagcaacagtatcaatctacactgcgcaaccggcaaccaaaccccaagtcaggcttccaattccaactaccaccgcttcacc

SEQ ID NO: 6685 - DNA, 2000 bp, Oryza sativa
accttatcatcatcagttatcacttaccacttatcagcctacctatctttgtgcgctttggatagccgccatcaataatttctttattaatttccaaaattattcggcttacgactcgttcatcacggaccgtagtcctctgctcggttaattagtcatcgtcgatggatgatggatcgattgctcaccgtgcagcgagatgagatctcattctcatccgattttgatttggaattaatttgatttaagtgtgctgtgcccaacagcagcatgcagcagcagatctgcagatcggattgctagtatgattgattgtttggtccaacccaccaaacttcattttcacaaaaccaggctaaaaagtgaaactttacttgtaaacaaattcaaataaacatgtacgtgtgtcggtgtgtacaactcaaatctcgatgaacacatatttttgaaaaatctacacaaattaatatgcaatccaaatacactgacaatatatatttttgtaaaacccggaattwacagaaacctcatcatgcggccatgcaagcgacacgcatctatatattcttcttttccatgactggtcctactggattaattaacggtaatcaaaacaatgtagaattatctcttggataattaacggtaaatcaaaatttcaaaagtagaattatcgatctcatctcacccgagaagcaggagaagcagatatatatgcatgatcctgtttttttgccacaccgagtcaaaactggataaaacgcgacacacataaatttacacaagaaaaatagtaattatccaaggtagatatatacagtattttgataaaacgaacagagaaatttacaaaaaaaaagaatatcaattatcccaaggagatattttttttagatgacaagtacggagtataacaattattactgctgtatatagtatttcctccgttttttaatagatgacgccgttgactttttctcatatgtttaaccattcgtcttattcaaaaattttatgcaaatgtataagatataaatcacacttaaaagtactatgagtgataaaacaactcataataaaataaattataattacataaattttttaaataaaatgtttgaccattcgtcttatttaaaaattttatgcaaatgtataagatataaatcacacttaaagtactatgagtgataaaacaactcataataaaataaattataattacataaattttttgaataaaataaatggtcaaacatgtgagaaaaaaaattaacggtatcatttattaaaaaacagaggtagtattaggatagacagaagagaatacaattgctactgcgtactactaattcataacccaattatatctgttgaagcaaagtcaaaatcgaactaatctaaaaaaaaagaagatgtaactaattttcctgcaaattatgagcaacccaccaccagcagcaggtggccccaccgaattgcgaaaagaaaatatccgcaccaaaaaaaaataaaaacmcaaaacgtgatccagcccacccccaccgacgcgcgggccccatgcgccacaccaaacgcacgtaacgcaacccggacggagccaagcgcacagcctgtcaccatccccactgccaggtkggccccamctcamcccctgccctacgtgtccgtgactgagggtacaccgtccaatcgagccggagttgcctgagccgttgagtcgcgggtagtaattctttttttactcggagagaagagaaaaatccaaattagggtgagattattacggatccgaaggggtaattagtctcggattaagactaattacgcgataatccctcttcgtctcgggctaagccttatcgcccccaaagccctttataaacacccaacccctcctcttcttcctcctcatcgcttctcatcgcaaatcgcatcgacttcgattcgcttcgtttcgttctcgctgttgatttgttcgtgagatttgaattctagca

SEQ ID NO: 6686 - DNA, 2000 bp, Oryza sativa
gtacgatacgactacgatgccaacggcatctttgattgatttgatattagtatatatcaccatcacactatcacaattcacagtcacacaagtcaggcttggagtattgaacaggctctctctagctctacatgtatacaatagtcattcactcattctcactcagccgccacccgccaagatgtcccctcgggtagcccaacgagagaacgagccattgttacttgtactcgtcctcctcatacaaaccttgatcgcgagctcgcttccatgcttgccggaccaggcctacctgaccatcttgcaccgtcttcatctcattttagatctggtctacttcctaactttttcttcaaactttcaactttttcatcatatcaaaactttcatacacacataaactttcaacttttctgtcatatcgtttcaattttaatcaaacttctaattttagcgtgagctaaatacaccctaaagcttagcgtacatggcaggacacgtcctcgaatcttttctgcatcttcgtcaggccaacaaacaagagccacagagaagatgctcctttttccttgacccggagagcaagtttaatagtatagctaactactagctccaattcacctatagtcaatctaatagcttatttatacaatatttatatattacactattaataattggtcccacctgttatgcaaacaccgcgttttgaagtccgtgctacagctggctataaatctgtagcgtgctactcttctctcttcttatttatcttcttaaaatatgtttaaagctaactttgatcctgcaattgtacctgctcggataaattgataatgcggtttaaactttctatgccattgcactctctctgccctaaaatgatcgaccaatgaatttcaacagagacatatccagattcgttgatataggatgaatcatatctcatctaagttaagttattttagggcagagggagtacatctcaagtctaaataatctaagtatagaaaactcatggctacacttattttacgatgaagataactcatggctatacttattttacgatggaggtagtaggtccgtttcgttccagatattcaaacagtctgtacgcaaaaagccattcaacggccgcgacagtacatgggttgaacgttaagcttacgctaccacaccgcgacacgggctcatatttcattttctaaagactagccatgcagtcatcgacaacgacaggactaaaacagaggcgtcatttcacaacagaaaaattcacatgtaaggatcaacggttcaacaccatcttcagaagaaaagaatatgataaaaattaagtttttttatgtaaaataagatgatattaacgtataattaatttaagttttaattattataaacttaaaagatcaactttcatactgaaagttttcgcacaaaacacaccgtttagtagtttaaaaaacgtgccataaaaatcttaatcttcatctaacttttattggagaaaaatgaaggggttccaacactgcatgaacagtgtcattggtttttcttcttgactttaaatgaatgagcttaccttgacttcgcccgccattcccacggagacggagtgaactccacgtccattgatgggttgctttaccagatcgtaggaagcaagatgttatgtaatctcactagccaacatagggtgcgtttagttcacgttaaaattagaagtttgattaaaattgaaatgatgtgacgaaaaagttaaaagtttgtatgtgtaggaaagttttaatatgatagaaaagttaaaagtttgaagaaaaaattgggaactaaatcaggccataggccatagattgtacagaaacaggcctggatgacacgggatgtcaagttttcacacggagaggaatgaaattcgcgatatatatgcatggtcaggagccaggatgtcaagttttcacatgattcagtaagcaagcaccaagtgaactcgcaag

SEQ ID NO: 6687 - DNA, 2000 bp, Oryza sativa
tctcaggggaaatccctcctgagttagcttctctaacttctcttgcttggttgaatctttcgtacaacaacttgaccagaagaataccgcagggtaaccagttcgggtcatttagcaacagctcctttgaaggtaatgtcaacctctgtggaaagccactctctaaacaatgtgatactccaggctcaacatctccaagtgcatcagctccttcaggtaccaacagtttctggcaggacagacttggcgtgatccttttgttcatcttttctggcctggggttcacagtgggcttcatattggcagtctggttcgaatcattgtgccacatagaacgatggaatcgcaaaaaacgatgattgttagtatacactatatgtatggtgtttatccacctacggacatgatatatgtgtatgtgtgtactcgtaattagtgagaatttaaattcattttctgttgataagaatgcagccttctgctttgcatagttttgtatatgtgattatcaggtctagtggcgccatctataagcaatgtgctctttgcgctaacctgtgcggtgggccggtggcgcattctcttgaacacctggtggccctcgtggtgtggtggtggaagaagagggcgatgacgaagcagacggacaggacgggacatcccagtagcgatccattgattgccgactgcaatatctgcttgaaaagtgcaacatctggaaccttggataccatctcaccttcctctccgcccccctcatcctcacccccttacaacctcatgccccattccggcgaggtccaagtggtggcggttatcacggattgggatgtgcgggaccgcctgaggtgggggagaaggacagcgaggggtggaagtctcgccgcagctggtggcggcgccgccgcaggccctccagggcggcatgcgcttcagccttcaggcagggcgtgcaccatgcaggagagggagatcgttccgagctcgccaggaggatggccgggagagatccccgcccttgtgcagacgctgccgcctctgacccgccgctgcacatcttcaatcgccggccgggtcgccgggaaagcagccggaggcgggacatggccgcggccccgtctggtgttcgccgcaacataacaggctttccgtgggcctccaaacatctcggcccgtacatgtcgaagtagttgacctagtaaacggcccactgcctagacagcacatggacacatggatgggccgacaacatcacggcctgttcagagaccgcaccatcggtctatcgcgctcacccgcccagtcacggtctcacggaggcgtagaagtgatcgaagtgttaaatcctagatttcacactgctaattgtatttcttttaatggtagatgtacacgttgacggcaaggcgcatgtaataattttattaatcttaagatataccgatccagtcttccggaggtgtttatagggataggatgagtatgtgcgcgttgtgagcgcttgtgtttgtgctgtgttttttaaaaatgaaaaatggttttgcgactaaactacatgttggtgacgtgacgctggcaaagtatgcacggcagctagctggccagctggtgctatcggatttgtatgtttcgtggtacttctgtgttcatcgtctgaccagggcacggccgcgacaacgacgcatgtacacttgttcacagccagttcaatctctaagtgcgattgacgtctcgcacgattacgatgccaagttgtcaatggcttcgtttcaacaaaaaaacatttgccttgacttgaataatctacctttctggccataggcagatagccagatatgtaggaagtttttaaaaatcgagcttacaaaagggcattttccctaagcataaagtccaatcgaagattgtaaatcttcttgtgctcaaacaaaggatctctgtctgagtcagacagtcataaaattagttgtttcaagcatacaacaatcaaaggcgccaaa

SEQ ID NO: 6688 - DNA, 227 bp, Oryza sativa
gscgraaamgttgstccccccttcccttccccccccccttctcctcgcttctcgattaatatctctcgtactcttgctcctcttcttcttcttcttcgacttgactccccccactcctccctcgtgctgctcctcctcgtcgctcggctcgaggcgcggcatttgcggcgggagggatctgcgcgcgagtgcgtgcgggcaggcggcgggggagcacgcaccggggg

SEQ ID NO: 6689 - DNA, 2000 bp, Oryza sativa
tcttgtcatgtgagcttttctttcggtggtgacatgcatctttagaaaacgggatttccaataagattatcggaaaaaaaagaaacatttccaacaaggtgggatcctgcaggatcccctgaaaaaaaaaaatactgagatcttgaaagtacagtaatacacagtatatcagggttgtatctgcaaagttcttcagagaacaccaacaatctgtcctggtgactgggtcatgttgaatggtctgctaagaacagcgtggcagtaatgatcaacggacaacatctctgctccaaacccaaactgaaaaaagggtaataaaacgctccaagtagcagggacataattgcgatttaggacacacgcctcctgtagtaaacttgctccatggatttccttccaaccatctgacccacgagctaatcttgaactagaaaaccttaacagacgcgttgaattcatgcagaaggtaaagattcagtaaaatccgtgaggtagaactaggaaaaccagccaatccgaatcccaggaacacacggctagctcgaagaagattgcccaaacaaaatgcctattctacatctcgaccacatggtctcatttctgctctcaagaatcacatgcctattgaattccgtaatcattttcaagaagcaagcaatccggagatgtatattttctgatttcctcgtatgaacatttkgtttcccgtgacctccctcctgaaataaaaaggggttgcattcagagtttgtgaacccaggaatgttcagaaaatcggagagctcttgktcattttttcagcmaaaactagccggtcttttcgtttcctgacgtcagtaaggctttgttcggttaattcttgtgagggagggatttaaggggatttattttacacctattatgatgtggaattactccttctcaatcccctccaattctcttcaattccctgtaaaccgaacaaggcctaagggaggtcctgtgaacccaatagtttataatgagcttaattaacttaatttaagcataaacagagcacggggcttcatttatcaggtaatcaggtttccctgaggcatttatgtttgacttgttactgtataaattgtagaatttcgtcgcacgtcaatatgcatgattaaatataatcttgtcttagtgaacaatgaccatacgtatactcggctgactgcagttctgccgtaagtaaaatggtgatcaaacagaaaagaggtcaaaaccacttattccccacttcaaaatttaacaagcagtagccttgcatctagaaagatgacctacctgaggtgtaattttacactcctttatgatccacaaaattatgatcaaataagaacgaaaaacacaacggatccaatttaagaacgaaccagtaaaaacaggcaagcagccaagatagcatcagaaatagataaacctgtgtgtggtgtaacataactccaattaataaacaaacaaaatttgatctaaaaatattgtctcttgtcctgtagtttgaatcattttttacccctggacattacctttaaaccgaatttatttaccgcaattcaaatccaccagatttacccataatcccattgaaagttttgagcaggtcaaagaaaccattcctggccaccaacctctctatccgccaaaaaccctacccgctccacacgaaacaagccgcacggccccacgcagctgcgaatcccgtccccttagtggtgggtataatatctcgtcagcttcgcgcaagcgctcgcacaatgcgccgccagtcaaacgccacgagctttgaccagtcaacggtcaaagtttcaaacctctatatagtttctcctcctgtccgtccaagcaatccaaactctctcttccctcmacccccgcttcctccttcttcccgtacgtacacgccggaggccggacagagacacgaaccgcacggcgacgagctgtgagacgcggcggttttggtcgcgacctgagggattccg

SEQ ID NO: 6690 - DNA, 639 bp, Oryza sativa
  misc_feature (1)...(639): n = A,T,C or G
csttgaaaattwcccggtamccggtttcccaggkamccggttmcccgakgtkscaagymattggacaaccttggaattggrrcscmmtttkwycaangtggactttarwamctshmwwhsyhcmakggmcatrraaatgsvmhmarrttcccnkggaaaacccnaawtcggggaymcnnawntwaatyccymaawctgtrggkayccncgrtgcccmtgktyccggaaatccccgggggaaaaanmcggamcmgggggwwaaggtccaccngggggrtcmmccggaaaagccccmtgrttttgacccgggtccccaaaaaattyawyggcatgggcsttktttttaggggccccgggggtcccttttgacgagttgcatttttaaacctccgragttaagggayccmccyttttaaamamacatttttaaaamtkttgggggtcattggccattttaaggraaraaaaatgcagrratttccccgggktgcctggktkgaaattcccaggtttcccgattttgggggggccctttttttttttttttgggaagcagtatatatacatatgcatagtcgatgtaggcaccaatcgtgttaagtttgctagttccgaaagcatctgaagacatagacgcat

SEQ ID NO: 6691 - DNA, 2000 bp, Oryza sativa
ccgcgcggtctatccgattcaaaaccctcgcgtctagaaaaaggcgatatgcggggacgctgcgctttattttaagcaaagaaaatttattgtactggtgctttttattagtgctagtattactcgtactgctgtattttcttgtgtatagtacatgtaccgcaacggtagtactgctgctgctgctagtattgtactgtagttttttttttctcagagaaaagaacagaaaataagagaacggaggagaagtaaagtggctgaaacggctcaattaagcacgctttcccgagaggccgagacgtacaccatggctgacaatgcggttcaggcatgttaagtcgcgttttgtaaggtacgcccttggagaactgggtattcacataatcacgtgaagaaccatcaagcgtacaacggctctggcctggctagttaaatttccccatttatgaaggtgaatctggtactcttacacaatcatcgaaggattttacatgttcaaaaaggagcatcatttaacgttgttcggcattgttatcttgttatagacattcagcattgtactatcgtgttatagacattcaatatttgtcaaaatggacggaagaaataagtggagctcgaaacagttttgggaatttatgaggaacgccatgctttgtgtacacaataagatacaacagcggagtaatgatgtgtatacgaatacgacttgattactatatcgattggttagacgacgatgatgttagcatccattttcattactgggagaggatgatgtgtatacgaatacgacaacataggtagccgattaggtattgaaacctaaccgcctaaatacttgatcaaacaaaaaagttgtatctgcatcgcacggtatggcttgaatggaacatcacaagttatgaacttacaaaatttgactactctccgaatcaaaaccgcaacaaatgtatgaaaatcagaaagatccgcattaaagaggaaatcattatgatatttaatactagctgagtaatccctacacgacacacaatccctacactctacctggctaaccaacaaattccagtaccaaagtaatcaagccaagccagctagtattgcacctcggtgtagcgtgagccgtggccagtccctcagcaacaaatggaagccaccttggatgtttgcttataatggccactaatttactggacagctgttatacttcaatacctccccgcactttctgtttaagcttagcttgataatttgtactcacaccgagtaccagcaaagaaaaacgtaactcactggcgcgcccggagttaaaacacgaagatcactcgcaacagccggtcgagatgaggcctcatccccacaaagtattttctacacctagatgctatgcatgtaatttaaatagatatataaaaattttataaaatttaataaaatagtacatgataatataagacactatgcaaacatgcaagtctaaattcaatcgatatatgaagaaacaaaaataacaaattttgtctgtacggtacgggtactattcactgtctgattttattatttttgtttctctagttgtagatccaatttagtcctatatgtttgtgtatagacttatatcatcacaaacaatgttactaaatttttttaattttttttataactatttgagtcgtatgcaaatgataggtgccatagcacctaggtgtgaaaaaaattttccgcctcatcccaattcccaccaatacagggaacggcgagggcttgatcccataaaacaacacgataaaaaaggcgaaaaatctcccccctaaaacgcgacctgtgcggccctgggcggagaataacccggcggcggcctacggcgatataaaccgtatattgagggagcaasccstggtacagagcagaggaggggagagagagagagagagagagagagagagagaggtcgtgtgtgcgtgtgtccccggggttctagctttgggatgctg

SEQ ID NO: 6692 - DNA, 1995 bp, Oryza sativa
tgggsaacgggraacggggcaacggctggccygtgttccaagktgggctaaccttggggcaargttccgccarggggttcgccsggggcscggcatgggcgcccgcgcgcagcccacgccgtcgtgggcgcgggagccactgttcgagaaggccgtgacgcccagcgacgtcggcaagctcaaccgcctgctggtgcccaagcagcacgcggagaagcacttcccgctgcggcggacgagctccgacgcctccgccaccgccgccgcggccacctgcaactctgcaagggcgtgctcctcaacttcgaggacggcgaggggaaggtgtggaggttccggtactcgtgctggaacagcagccagagttacgtgctgaccaagggatggagccgattcgtgagggagaagggcctccgcgccggcgacaccatagtcttctccggctcggtcgtatggccccgacaagctgctcttcatcgactgcaagaagaacaacacggcggcggccaccggcgacgagaagccaattacaagcggcgaagcaacacgcgtcgtgaggctgttcggcatggacatcaccggcggcggcggcgattgccggaagcgggagarggcsgtggaaatggggcaagaggcgttcttgatgaagaggcaatgcgtggttcatcagcgtactcctgccccttggtgccctgctgttaatacatcaaatcaattcatatatacatcataaatcttccatctttttgttgttcatcgcctgttgttgtttcatcttcgatttagagcggttctatcttcattttttttcctttgttttgcatagaagtttgccaaattcagagattgcaaatgatcgatcgatcgtgccccgtctccaagctggcccgccatcgcgccaccgccagcgccgcttccgaacctccggtggaaggcggtgtacagagcttgcgcgatggcaggccggcttggagacggggcaggcggtggcgcggccaccgtcgccactccggcccccggccgccgccgccaccaatgcgtcagaacagggaagagaaaagggggagagaaaagagagaagggagagagagagagagggaggaggaagaagggaaggataaaggtgggtcccacaatttattttatgtatgaatgacagatggatcccgcaggtatttttttaattataatgtcacgtaagcggcacgtggaatgaaaaccgggttagcaccgccacgtcagcaccacatcagcaaaactgccctccaaaaccgctcgaagagtcaaattgcactggtttcagtaattcaggagtcgtcctacccggttttacagttaagggtcacgaattaaattcggtgaataattaagggagtctaagtggactttttcctttgtggatagataatgtggccctaatccatgcgctcggttgaagtgagcatatcgatcaaatacggacataggagtacgttgttttaacttttaactgagtttgctaagtagccatactgccatactcctgttagagtaaacatctctccacactagtacgagtacttaaaatatatgacagtcaaaatatgtctgttcaatctggaacatgaagcatgtgcagttaatgcgttcaattcaccacatggttaagcccaagcggcggtaaaaagaagtgtccggttttcaatcagtttacagtacaaaattagcaatctcgatgcataggattcagatgaacggtcaaccacgcaaaacgggcagcagcaacgcagatgtatagcttcgtagtggtcgactaaacaagtctacgagatgtgaaccgcggtctggagcaaaggcgcagcgcctagtcccacgcaaattaacctcctagtaataattttctcctcctaatctcctatagtagtactactatactgctagctgctgcgtttgtctttgcttgcagcatagtgcaccacactacaccgtccgctcagcgaaggcgatataacagca

SEQ ID NO: 6693 - DNA, 2000 bp, Oryza sativa
acgtagcctataggaaagcgacgcgaaatcaaacaccacctcttcctagccgccgccgccgccgctcttcggcgtcgcctccgccactgaattctagctcgtgtcctaattttaaccgaggcaccaactcagggagtgtttagatcccatcctaaaattttacaccctgtcacatcgaatgtttaaacatctacctgaagtattaaatataggctaaaacaaaactaactgcacagattgcgactaatttgcgagacaaatcttttaagcataattgctctatgatttgacaatgtgatgttacagtaaacatttgctagtgacagattaattaggcttaataaattcgtctcacgtttactgacggattctataattagtttttttattagtgcccgaacaccccatgcgacacctatataatatctgatatgacaaaccaatagtgtatacccctagatctaaacaccccctcaaacgtgcacaaaatgtcgcttagttaatacatatagcacattcctatttgttactagtattagatactaacattatccccacacaactgtagtacatatatatttgtcagagttatggataaagcatacctcttatcctacgattcaccaagtataccagattggcatacctcatataccacgatatgtttctatatgtgataaggaaatgtacaagatatatggaaaataaccttacgggctggagactatcagagtccctacttggaaaggatagggactattctttatcgtgcaggtttcgttgtctctgagttctagttagagactaaggcaactcacgcggtataaaagacgtacccccggaggggttcaggatcaatgaatcgtagcgccaacacatccatcatagtttacgaagccgaaggactcaacccgaagccgccgggagatctcgtcgaataatcttggcaaagatctcgttggtatctctgttctctttgtactctgtgattttccatatcaatatcatataaactagatttgggctattatcttacgagaggcctgaaccaatataatccttgtcttttgtctgttttgatgttgtatcgtgtagatcctcgtaccaatgtaccctaatatcctatttatccggtctacgggtacccccgtcgataatatcctaattaaactagctagggaaaacaaatcccggcccatttgatcttcctttcaatgattaatttctcgattatccatcgattctgcatgcacgtagtagagctgccatatttaaagtggaaataggagatttgcactagcctgggtatagcgtcaaaagctgaaaaattatgcagcaaacaaatttcaacgattaaactataaatcggttgaggtctgaaaaggaagaccgtgtcataagaaatgcgcaactggtaaagcacaattgcgtagaggtaaagcacaattgcgcaactggtaaagcataactataactcctctattctcataataattttgattttacgagaaactgtcccatcgaaacatgcccttaattacattaagttttaaaaaatatgcccttaaattaataccaaaatgtgcggttggggctctactcttcgttttatggagtatatatatataactatttttttgaattgccaacgggcatgtgcttcttgtctgctaggcggctgcaccaaccctctgaacaagtaaagatagcaccgcgtcctcccaaaaaaaaaaaaaaacaaaaacaaaagcgascatgtgtgcataaaaggcagaggaatcaatcaaacagccattcaacgtgcaagcgcgtcgatcccatatcgcacatatatatacacatacatagcaggggttgcacaataccatctccaaacatcaaaaacccaagctcgctcgctcatcggcgagctccaaatccacctgtgtagctcaacaggacgcacacgcagagcagctagctaccaaagcataacaagctctgcagcctcaagagtgaac

SEQ ID NO: 6694 - DNA, 2000 bp, Oryza sativa
atggaatcattcgtgtagtgttggcttgtggaatcgttgatctatccaatagagttttttttttaagtgctcccgatgtactactaaaacttgatgtgctctgtgatcgtttgcagctgattgagtggagagatctctcattcttcacacgcacattttttatactactaaacacaatatgttttatgtaaattttttataaagttattaaaaaatcatattaatctatttttcaatttaaagtaattaatacttaattacttatacattaataacttatttcgttttatatattttcttaaattatagtattgtacatggtgtatattatcgacgagtactactcgcggaccggatgaatagagtattggggtacgttagaataagggtctacgtagtacgatattaaaacagacaaaagacaataaacataacctaccaagctacacttagttcctagtgtgccctcgttttgtcgttaaatttaactgacatataaatgaagtattccgttcggtttttaataataggtaaaaatgtgtatttttccttgtaactggcttgcttcggaagttcggagtgtgcactgaaaatttcattatttgggccttccttgaaacacgtgtttagaggaacatagaaaatatagaacacattaaaagtataatagaagcgcatatgaaaaccatgaaaagttgtaggaatggacggtcattttgatgggctaaaagaaacgtagcaatttaagtattatctttataatgaatagaattatgaatgttctgatccacgttcccctgccttgaacctacagaaatgaaaaaagraaaatgagttcatcatgtcaacttacctgtgaagttcctttaaaaaatggccgtaggaaaatttctcattcttttatttcatctcattcctaccaatcaaagggatgaacaataccaatttctagaggatgcttgtgcctatgtttttccttcattttctctgaaaatcaaagggggtcttcaccatgttctgtttttctgccaagagcaaatgccatctaattatatgtgccaatagcctatagaagaattctgcttatcaacgatggataaccaggaggcttctaatcagcgacagagtgcagattagtactgtgagaatgtttgggttgtatacctgtataccctgaacttagagaagaaattttgatcgagaatgttctttacgtcgtcgaggacgggggatttcacctgtttccgcgcaacagagataaagagaaacgacgaaaagggaatatctggtcagctccattcaaatttcgcagctacgaaattcatccggatattctctgaaccatagcagaacagaacaggaatgataatacaccgattaataaattaaagaacacacttaaatcgtgattagaaagagaaggattcgactcttctggactcattagagctgcgttcgcgaaaaaattaaaagcgttcgcgaaattagagctagcgaagaagcagtgggtatttctaatccaaggtcccaattaactcggcgatcaatttgatcaccatcaaaacccatgtttccatggataatgacaagagactggtgtgttttcaagctaaaattagaagtttgatagaaattagaacgatgtgataaaaaagttgaaagtttgtgtgtgcaaaaaatttttaatgtgataaaaaaaattagaagttcgaagaaaaaattaagaactatatcaggcatgtgtgatgatatgtcaaacacccaaagcggggcgccggggcccaagacgcggtcaaattaaatcgcctttgggcctttgtttcgtccggtctataaatacactattgcttttgtccacagagccgaggcacagctaactcaacgcaaacaaatcaaacgccasgcacctctcgctctcccactgaagttgtgtgtgccaccgcaccgtgtcgttccctctccttgcaacggcccacgaccagccgccatacgcagcatac

SEQ ID NO: 6695 - DNA, 2000 bp, Oryza sativa
gcggattccctttttgggaaagcgtaaagcgcgcgtggctggctgcctggcctcctctcgcgcagcggattgggcccgcctgtcggtgacaggtgccccaccgggccacgtggctggctgaccaccagtggtagttgactactccgcaattaactactcctacctggataaaaggcaattatgtgccaatcagaaattcagaaatgtgaattcctcttaccagttgacttgagaccatgtggattaccaaggcaaagatgatttggtctatcaccctgctgattaatctaccctccgttcaaaaaaaaaatcaaaccctatatttaaatttggacatatttgaatttttttacrgagtattaggttaggtttaggtcttaggacatctctgtgattagtgattaatccccaattgtttcaagtacttgcttgcctatttgtaagtaactttatactctctggtttgtttcagaaaaacaacaaaaaaaaagggaacatttcacattagtatcttcatacaaaatcgttcacctaactacaaactatatacaatagtgaaccgatgacctttctcgcacttaaaaatcttgaacaagattacttgttttgttaaaaaaaactattcccttcatcatgtggatatagtaatctacaactgaaatggatgttttataatagatgtatcccatccgattctagattgttatattctgagacagagcgagtaaatctgatcattttgcattaacttttcacgattatttgctctttaaactccatattgttcaaaactgggcaatgctccatctattttaaaatacaagacataactatccttagtccaaagaccaaaaaccaattattatcatttttcttgttcatatcatcataataaatacaatacatgcacccaataaaattagagatattgagaataaatgatttaaataataacatttaacttaaagttgccattttcgtattcaaacacgtgctactaactgacaggtgggccctaaccgcggcatgcaacgctggaaaaataagacctaatcaaccgaattttttatttatattaattaataagtcttgaattaaataagtggtaaatcttaaattgaatttgtaaaaataggatggacgttgtttcaaagggcgtccagatttggacgctgttccaagaagtgtccagaggtggacgctgtaccgaagcacgtccaggctcggtttggggcgcccatgccgccatgcggagaggcgccatcgtcgactctcctctcctcaggcccaatgttggtgcagggctcgggcaaggtgctgccatgcccgccgttcacctcgactcygggagactgcaayagccgccttccggcttccryctccacaaygtcaggaatctgccrttgcagttcacctcaactcacctcgaaggctctcgaatccggagaggacgccgccgctttytgccttcacrccgggaggtcgcagccgctatccacgttctggttgagtcatgctggaacaawaacccactcgtgccggcttgtgytgcgtcgtctgtccgcccctcttggttcctamcagcaagtccaggcatcgcctcactccaggtggctggccgagcaagtatgctcarttcatagatcttggtattcaggtgtatatgttctgcaatagaaagtttasaaagaatgcaaaattacgaagggtasgacgcaaacatcctccttctatcagatcatctgtcgcccgatgacttccaatctctggcytgttgcaaaaggaaaaaaagcatcgatcgaaracmtcgcatgcagttcatctggcgrccgcttctcaagattcagtcagcagagagctcgatgcgtagtaaacaatggaccagaacaaaaaccaaactaatcaaatatctcaaaataaaagtggtggctgttcacatatgaccccgagtagagtgtccgtcatgcggaacagcggaagcattgaaggagagccggggg

SEQ ID NO: 6696 - DNA, 845 bp, Oryza sativa
  misc_feature (1)...(845): n = A,T,C or G
ccccgsnatnrattccccsgcaaaacccccaaagacgggtttaaggggtttycccganccyrataaawwwawaccanggaacatytttkyttkctygaaatgctntgttsgcnttcnggtcagwwaawtwtagncccccaaaaaccttactggagcagcgagcgcagcatccaggcgtacttctcgtgcgtctgcagccgctggtcatcagatcctcggtcggggcatcgtcacccttggccgcacgtccagcacttcacgtgccgtacggcagaccgcttcgttggcgaccaccaactggcgtaccatttcacgccagtccgcactgtcggtcaggcccggttcctcggcgatcgaggtcagcgcagcgaattcccggtaggagcccggggcattgaagcccagcgcgcggatgcgctcggccacgtcgtccagtgccgcccactgctcggtgtactgcgtctcgaacatggtgtgcagcgagttgaacatcgacccggtcacattccagtggaagttgtgcgtcttcaggtagagcgtgaacgcatcggcctggaagcgcgacagaccgtcggcgatcttcttgcggtcgccctgggtgatcccgatatcgatgttcggcgccgacggtgccgccgctgcaagcttctgcttgccagtcttggccttggtcgtgctcttggtcttcgccatggggttcctccttgtggaatcgttggccttcacaataaaccggtcgtgatgactggtcgctttcaargttttgaacgaaccgattgatgaactctatcgataaaaatccatcgccccgcctgcgccaacagcgcgccgccatcgacggcgcc

SEQ ID NO: 6697 - DNA, 2000 bp, Oryza sativa
cwksrsmgcmmstyymmkrwtayrgcssrssrawrsbtcsamrkkayykrwwgcsartwtrakakmtaawkmrkryrryrakysmyywctwyrckayyrcykcmtscmkcyhtccbgcbgcttcccghagccgcttcccgmagcttcaaccgcagccgccgcttcccgccggatctggcggaaggggaagcggcggcgggactggatgagagtgagagagagagaggcggcgggctatctctccacgaccgccgctgggccgcccctcccgccacatgccgccttgttatgacccgcctcccgccgctgcctcccgccgcctcccgccggatctggcggaggaggaggaggcggcggctgcgacggaggggagggcaccgcccgccgcccgtggggagagataaagagagcgagagagagagagaggcggatgtgaagtgatgagaccgagagagaggggcttcagcgactcggtcttatcctctccctcggtcttatcggctcctcggctcggctcggtttaaaaggtgtcgtttttttttaaaaccgacacctataatttataataggtggcagcgggctgatatacgtgtgaaaggttctggccatttttagaaaaaccggcacaaaatataatagatgcaggtttttatttagaaccgacacttataattagttaaaggtgctggttttttacgatttaacctgtggaggtggaaaaaggcttataggtgccggttttagcactgccgacacctgtagtgacgacacctatttgatgttttgtagtagtggttgaagtttagaacggatatccgcaatttgtcggtgaatgattttagtaatacagttcatggttaatgaaaaggattttcaattagtacatcttttgtagataataagataaaccactggtcactaccatatgaggtgcgagtgataatgttatcttacctgttcgttatcatgccactaacaacggattcacacaagtcctaattaactcacgtgctgtgcaaatcatcattacatagaacaaatgaaacaaagaacagagtaccaggcaagtagaattagagcaagtactgtgcaccttatcactcagcctaagctgtcatatagattattatgatgatattgatgagagaggagaaaccacttctcatgtaaagtacaatcttcatataaattttaagaaataaaaaagaaaagagagcagtggattgacagtaagtgtattgggatagtgtgaataaagataatacattgtactatatgttaattctaaattaataagcatatgatatgaataaaactaaaagtgattattacttctattataaaattttccctttagcaacatcactaagggcctgtttagttcgcgaaaaaaaaattttggtgtcacatcggacgtttgatcggacgtcgaacacgaatgaaaaaactaattttataactcacctggaaaccgcgagatgaatcttttgagcctaattaatccatcattagtaaatgtgggttactgtagtacttatgactaatcatgaactaattaggtttaaaagattcgtctcgcgaattccctattaactgtgcaatttgttttttaatttatctatatttaaatttgttttttaatttatctatatttaatatttcatgcatgtaacccaaagatctgatgctatgtttttaggaaaaagttttttttaactaaacagggcctaattcaccggctaaccttaaacctcgtcatcagtgaacagtcacagaagttttgggaatccactccagtggcaaaattaatctaacaccctggcatcgaccgccactcacatatgtccgtggggcccacaccaaagaccgttgacttgactagtccactcctctttcacacgtatatcagcccgagccacccgtgtactccactcatcactccccacccccaacctcagctcgccgctcgcgaggaaaccggctccgcgacgaaaagaata

SEQ ID NO: 6698 - DNA, 28 bp, Oryza sativa
accggttcctcggtcactttcgaccccg

SEQ ID NO: 6699 - DNA, 2000 bp, Oryza sativa
catgttttaagaatcaattattttaagaatggatattattaataaaaaagaacgggtcaagttctactaatttaatttaacaattatatctaatcttatataaccttatactaccattttgcaaggtttggactatgagcattgtctttagggtttgttgaaaccatgccaccctatatttgtaaaatttgagatatatcacccgtatctcaatgacatgtaggatccacatgagtcaatgacatgtgggtcagtgaccaggttcttgttccaatttcaacaacatatatgtgcttaatagtatcttcgttttttaatatatgacacgttgatttttaacacatatttgattattctggtcttatttaaaaaaatcacgcaattattatttattttattgtgagttgttttatcacttacaaatattttaagtatgatttatatcttatacatttaaatttttttttaaataagataaatgattaaacgtgtgttcaaaagtaaatgatgttatatattaaaatatagagagggtaaccactcctatgttgcactgtactctatatttttttccttggcacagttttcaactaacaataatacttcaactgtaccgtacaagccttccacagcaaatactagtcaagtactgatcactccaaacactatatgtctctgttgagagagaagtgaggaaatttagcgcagttaatgatactccctcaattctaaaatatactccatctgttctatattaattgacgttttgaacatagttgagattaaacttttataactttgactatcaataactttaaaaatatttagtttaaagaaactagaaaaacatatatagatttgtctttcaaaacactataataaaagtaaacatgtatttatttattgtatatattataatagaaaaataaggttaaaggtatatcttgtagagctagcgtatcattgtctaaagcgtcaattaaaacgaaaccggagggagtaaggcacaatcacccttaactagctattatataacaaagaaaattggttgtgccttatattatagaatgaatggagtaacatttaaaaattaaatagtttctggatactaatgtagtagttcattttctacattttataactattgagccttacaatctagagcgagaatataatatagtactagattatttgatgggggctagttggagattcttaaaagtggacacagttactagaaacttcttaagaagagcctatattatatttgaaaccttcaaccagtaatacgttgtgtatatagcatatgtttaaactagacgtacagtgagtttctccgtagcaaaagaaattctaccaagctaataactcaaaaatacaattagtataaagttttaattgttactacctccgtctcaaaataagtgcagccataagtttccgcgcttaactttgatcgtctgtcttatttaaattttttttataattaccatttttattgttataagatgataaaatatgaataggactttactcatgacttatgttttaattatttttaaaaaaattttcatataagaagaatggtcaaaattgaacgtggaaaactattgttaggaagtacagctagtagcttttagatcgaacaaacggtcatcgcaccggtcgagccagtgaactcatcacgttgacccggtcgccatgcacccgcaagctcatccacctagcccaagcccagcccagcccagcccaaaccatccatccccggcccaccccgccgctgacggctggctcccacttccggaatattccgtccatcgccgtcaccccacctcctccctctctatcctcttctcctccatttccctctcctctcccctctcttcgctggttcaatccccctccttcctcgaatcttcgcttcccccccccccaacccttttggccgggcaacggcctctacaaatccactaaaccccttcctccgcctcgccgccgcc

SEQ ID NO: 6700 - DNA, 2000 bp, Oryza sativa
ttaaatgtataagtgagagatagagagaggagaagaaaattatagccaaccttatagctaatctagtatatatgttggctttaagatgggctaatagtagaaagtgagctctaagcaagctatatgctaatgtggaagagrgrggttaaaaaaattggatagtgtwagctctcctgcaagagctagctctacacaagctccaagaaatatgcatttctgtggggtctagtcgtttttgtcacaggctttttgtgtctctgtgtatggktttgccyggtttcccctttagcaaattgtgcagttgtctagtttttggaccggttttccttataaacagggtcaactctcttcttctaatatatccggtagatctcctaccatctaatgtttcaaaaaaaaaagaaatgtgcattaaattcatagagtgagaaagagagagaatggaaaaaaataaagctaaccttatagctaacttatacatgttagtactacgtaagtagtgagctctactatttaaacttgctctaagagcaagtttaatagtatagccaactactagctccaattcatctataggcaatctaatagcttattcatacaatagttacatactacactattaatatctggtcccacctttcatacacaatgcgtcttggagtccgtgctatagttggctacaaatctgtagtccactgctcttctctcacctcatttatctccttaaaatatgtttgccgctggcttataggctgctattttacctgctctaagtgttttttattggattcagtttccagaactagcagttcaaatattttcttagagcaagtttaatagtccagccaactgctggctccaaagcatctatagtcaacttaatagccaattcatataatagttacttataaacatatatactacacaatcaatatttggtcccacctatcatacacacatgtgtcttgaagtctgtgctgtagctggctacaaatctgtagcccactgtttttatttcttttcttttatcttcttaaaatatctttatagctagcttttagtctgctattgtaactgctattacccctcttaattattcaaccctcccagaaatatgactcatgttgttgtgacattcagttagtagttttatctatgaggtcgtataaaatcagatgggtttgtagttagggtacaaatttcgattatttgaacaaccaagcatagtaataaaatctttttattactctggctaatcttatgtggtttactcatctaaatatattttctttgataattaggacatttaaattccacagcaacgcgctggatattatcagttaatactacaacaactgctaattatttactctaaatgtagggattcttgttaccatgaaaaaaattacctgtttcaacattaccacctgcggatcaaattaggagcagagattatgacctaaatacctcttattaaatagaatgtttatgagtggacgtgtagcggagtaagataagaaaatwaataagatgtgattaatgagacaaatagatatatatcgtttcgcttattcgtggaataaaccaaacgacatattcgcaaacaaaaagtaatatgtgaataaaacttttatatacatgttcttagtgatttaaaagtaagaatcagctctaaatttaaattgtggctgataaatacgagtataagcatacagatagagctactccgaaaactgataagtatgagtatatgattgaatctgaaattgtcccttattctaggatgcagggatgtactttaactaggagtaaagaaaatccctgtttaattaacgccaaactttccccaaattctaaacttttttaaaattatagaggcctcaccaaagtcgacagatcccgtaaaagaacaaaacttgcgcgacgcctccccttacccctaatcccactccacccaacgaggagatagcgcaagagaggagagggtttctgcggcggcg

SEQ ID NO: 6701 - DNA, 950 bp, Oryza sativa
taataaacatgacggcgcccgtcttcactgacgcaagcagtgacacacgaattcgccggccggtgagctgctgcactgggcatgggttagtgtttcagttgttttgctccctaccctcgcaccatttgtgagctcatcacatacggcaacaacacacaccatcaaacctaccgagcacctgtcaggctgtcaccacccgaccattcccgaactcacgctcaacttctaacaccgtgtttagatccaaattttttctttaaacttctaacttttttattacattaaaacttttctacacacataaggtatatttggttgggtatttcaacttaccacacctcaagttagcacataccaaaagtgtggcgaacgaaattcttaacatagctttggctcaaaaatatgtggcaaagcagcaagaagctacctaactttctttggcaggctaaactatagaagcaaaacaaacaaaggataagcagttgtagctgactaacatgaggtgcggcattctatgggatggatccaaacagcctcataaactttaaacttttccgtcacatcattctaattttaaccaaacttctaattttagcgtgaactaaacacaacataaggaggtcgagtttagttccaaattttttcttcaaactttcaaatttttcatcacatcaaaactttcctacacacaaacttgcgactttttcatcacatcgtttcaatttcaaccaaatttttaattttaacgtgaactaaacacatcataaacggattgagatccttcgctgtcactgtatcatgtcctaaatgagtcccaagtgataaaggcgcgatgcagtcgaatgctgaggaatccatccattgctacctataaaagcgaccaacccactgatcgccctccactaccaaagaacaacacacaactcggtctctagttgaaaagctatagc

SEQ ID NO: 6702 - DNA, 516 bp, Oryza sativa
attatgtccmacaaaagataaccatgtcctatatgactgttaattgcgtgctcttaactctgtgagaggattgcaggagatatgtctgatcagataaagatctctctgtttcaccaaacacatgcaaaattaggctctggcccttgcttcaataggcaaacctaattttactcgcgcgataatctcctggtctcctggctttctagatcttagaatgttttctgaagggaaacaaaccagtactgcctctttatttttggtaatggcgtaattgccgcattaggatgctgcggtaaccgtagtcgtgttgcgcatgtattctcagttaaggaggtagtagtaacacttattgcgtttagacgaagtaatcagttgcttaaacttggttttgatttctgtaattaacatcagcttcttctcttgcttgtgtgcaggtgaattactacttgagtagaagtggtacaagaagagtcgtcgtctacctgtgagcgaattatttcgaggttgtgcgttgcg

SEQ ID NO: 6703 - DNA, 2000 bp, Oryza sativa
tttcattgacatttgtagagatgatacgcgggactatgagtcaataaaagtgagccatgaattaaataatcgaacccacttttatagagggttaaatgaccaaatctctctcgcaaatcaacagtattcaagttgcgtgccgcaggtaaaaaactgtggtgcttatgacgacagaaaagttttatgctgcacgcgcaatagcgtgatggaagaagacacgtcaaaattgtgcgttgcaatttggctgcgttctatgccccaggttggagagattttcagcgcacctaatacgaaataacttattaacatatgaataattaaatattactccctccatcctaaaatcaaaatataagtatttttattgttcagattcataactaaaaatacttatattttagctaaaaatatttatattttagcttgtaatagctaaaagttattacattttagaacggatgtagtaatatttataaattaaaaaatgtacttatttgattttttaaagaaaaattatatagaaaattttgtaaaagacatataatttaacagttcgaaaaagtgctaacaaacaaacgaggaagaactgaaagtaactctacgaaaaacatgagtaaattaaacagtacaaatgtggcacattgacagctggaataaacaacggagcacattgattcatcgccacacgtatctaaaaaaacttgtaaaacctccagtgcctcacctactctgcagtctgcactaatgatacccagccgcctgatagtgcgtcatcaggttttggcactggacggccatgaacgtctttagctatgacctcattcattcctcaatcaaacattttccgtccactctctttcacctaaaactgtacaagtcatgggtcctctttaaatgaatttttacaagttgcagcatttcttaaaatttctaactccatcgaacactatagcttctcacccaatttctaataatatacttacatcccaccgaaatcctttatatggatatttttatctatgtaattatatggatgaaatcctatatattctcagacggaggtattaatctagaaaatatgatattgatttttgataagttttattggtttttatataaacataagcatatttattcatattatttttaatccatatgattttaaataatatagatcgggactgacatgcttaaaccatcaactcccatcttaacaaaaaaaaaagaaagaggcatcactaaggcctggtttagttcccaacttttttcttaaaactttcaacttttccattacatcaaaactttcctacacacacaaacttcgaacttttccggtcacatcgtttcaatttcaaacaaacttctagttttagcgtgaactaggccctgtttagttcaaaagttttttttccaaacttccaactttccatcacatcaaacctttcatacacacataacttttctatcacatcgtaccaatttcaaccaaactttcaaacttcagtgtgaacaaaacacaaacacacccttgagaatgggctggcatctgggatgatagtactgtgcaggaggccaacacccagcagttgaggagtaggccatgaccatgaggaccacgagactgacagctacagtacccatcaacgtgacggaaactataaaaatttccgtttgatactgaattttgtagcaaaaaaacgcagatctggatccatacgaatactaatggcatcgtcgttttggctcgtctcctcccccgcgactataaaaacgggagctttgctgctgcgccggccgccccaccacctccggtccatctcggccgccgccgctgtcgctgtcgcgatcgcgatccccgcctagatagacttccccaagaacccgccgccgccgctgcaggggtggcgtggcatcgcgggagaccagctcgagccttcagcctcttttgcgccgccgccgccgccgccggtcgatccgtgttcttggctcaggcggcgtca

SEQ ID NO: 6704 - DNA, 2000 bp, Oryza sativa
tcatgcattaatagcttctcatttgtcatttcacctccctcatcttgagattgcatctcgaccggtgtcaccatctcctgagactcttgttctatgactagattttcctccttcttcccccagagcaccatagtagtacaacattctgtcttttctactttcttcagcaatgaatctttctttgatgccaatttcttcagggttttcccactatgagtcatctgtgttttccctatgtaagtaggaggtgcataatatgttccaaatctgctcccttgttggctcccttcacctctgagtttgtctccctcttggactatttttggttttgaactcatcatccatgttcatatcttcttcctgaccctcattgtccttgtcatccttacaatctccatcatcaaggggattttgcctattttcatatggtggatagccatctggttatcatatgatcatgtagcccaccttgttgatgtagatgtgtatggagaagtgtaattctctagggtccttacatacaactctcagtctcacacaggcttatctttcctcaagctagctccctcaatagcctcaaattccccaaccaattttataattgctttaactgaatcttctattctggctagtttgggtacaccataaattttcacccataaaactaccggttcatcttctgcctcttatgttatccttgtctcaaccacaattgccttgatcatagatgtctcaaagtcaaagcttttacatgttgagatcttactctcaccttatcagaagaaaaattaatgagaaattctttctcattaagttgtttcactttccactcccaattctaccccacaaacaggtgtttcaattcaataaccaccttcccacaactgtctccccatggattactgtcaaaattcctcttactagagccctagctaactctgtttctaacatatcaacttgcaggctatagaaaccttgccctaggattccaaatccacatagtttgatacctcttttcatcaaattcattgggcagtgtatagagatgtgctagtgttgcgacgtgaataacagagaaagagatttagacaagttgcctggttgtgaccttcgcggtacacttgaagaatttgatcttaggagctcccgcccctcgctctgcctccacccctagatggcgccttggtttgccctggggttttgggcaagcagttgccgccggagctcctcctcttcccttgcatcctgtccccccctcccaacctccaccgtgctccaccgtacaatgtttgttgacttgccaatccgaccgatttgccagttggcgctccatcaccacttgggcaaacgaaaacggtggtcgcacttcctctccaggaccttccaaatccggcgcgctgtgtcaccaaatcgccatatctcatcacctctcgccaggaaccctaggtgtggttgggtctcacctcgccttacctagatctactcttgcgaaacaatgggagagatattggggaaaatatcctccaatccaatcctcaccttagttttgtcatgactttccctcggttgctccgcttggggcttcgatctcactgtgggtgggcactgtagctagtggtcttgtgtcgccattgatgccgatctcgggccattcctctgtcgaaacttccttcacgggctgcagcttcgcgccacgagcctttgcttttgggccgcgtgccacttccgtgaggatatccgcatgggtaaaccccatgggacaccggttggtgaatggtgatcccctccggcaatcgccaacgcgaggacctcggtggtattgccatgttactcctgctctccctaaaccctaagctcaaagccatctttcctcaaaaggcaaataattgtcaacactggctgcttccgctattcatgatgcactaggctcaatcattcaatcgattcactatagtgagttagtgacctctgctcgtaattgtctgttcctcttgaaagca

SEQ ID NO: 6705 - DNA, 802 bp, Oryza sativa
  misc_feature (1)...(802): n = A,T,C or G
ttttttnsggccccccccccccccccacccacgtcgccgtccccacgcaatcaaaccgccacggatcaatcacccccggccccgtccgtacgtctgcgtctgcagccttccgtttcgttttcccattttccccctccctccctccctctgcgactctgccagtgcattgcctatctctatatatccatccacccatctcatcttttgtctctttctgctgctggagtagtattgttcatttatacatgcgataaatatcgagattaagcggaaactaaacatatataccctcgaatgaattaatgaactgaatccgtaaaatatgtatggtagatcggtagtacgtgtttgttccttttttttatataaaaaaaataatttgctggtgtttgatgatgcgaaggattgcattacattgatgatccaataattcgctcacgacgaaaccgcataattgcatttgtggttttgtttctcctcctcggctcctccctatatatgagctcgccactgctgccgcttctcctcgtcctgtacaaaactacacaccatcacgagaacctcctcgtggcggcgagctctcgcgactcgactctcggcgtcgcgcgcgcgcacggcgccatcaatcgattctcacatccatccatctgcctatctatctctcgcaattctggcggcgcgctgcgcgcatagggggggatcgaatttgatctagtggtgatggaggcggcggcggcgatggaggcggggcggaagctggcggcgcggcacccgcacgggcggagccaggacggcgcacaac

SEQ ID NO: 6706 - DNA, 2000 bp, Oryza sativa
ccaccacccacacgccgacatcgccaacacacacgcccaggagaaggctagcaccggatcggccgccactaagcgtgaccgaccgccactaggccaacaaaggggcacagacgagattctgcgaaaccacgtctgacgcaccgatgctccaccaccacacaagctttgccgacatgtgggacccctgcaccggcgtcccccgccggccagccttcatgcgtcgaagaccgcgccacacccaccggcagctcctcctcacacctaggtcgcctcctccatcaccggccgcgcctctctgcgccaagccggcctcctccaccggacgcgcctcgcgccaatccggcctccctccaccggccgcgcctctcgcgccaagccggcctccatctccgccgcctgcgcctctcgcgccgagccggcctccgctaccatcggctgcacttctctgcgccaagccggtttccgacccctccactgcacgatgccacgccggccagatgcagccgtctcccamgccctcggctagtcaagcgaggccgccatgccttcggtgaccgcaaacacggtcaccaccaccgtggccgctgctgccaaacacccagccacctcgccgtcgtcatcctcacctcgcacccaactccttcctcgccgccgacgttgccaccgcctccagagtcgcagctgccgtcaccgctgccaccgacgccaaccaccgcctccgcaaactgccgccgcgccgtcgccctccaccaccgagcagctagctgcccgacgccatcacaccgcggttgtcgtcgccaactgctgccggcgtccagagagaccgccatcaccaactgccgccggccaattgccgccaccatcgtcgccamamcgctgccgccgtcgccaactgccgccaccctccagatccggtcgagaggcgcggatctggggggcaccgccgccgccgccaggcactgcgccgtcgcagccacgggaccaccgctgccgcctccgcgccctcggccagctccgtccccgccgccttcagccaccgccgccccagcgccgcgcgcccccgccgcctcgctgctggggtcagagctcggcctcccacgccggatccggacaggagggggccgaatccggccaccccgccgcctccacgcgcatcaccgccgccggcggcctatccccccgcaccagatccgcgcaggagagcstgggagccagcaccgccgcctcgtcatcgtcgtcggcccggttgcccacctcttcaaccgtcgtcggcgccgccacctcgccgacaccatgcgccaccgttgatctcgacatcgcagccgccgaagtcgccgccccggagctaggtcggagtcgtgggctccaaacgccgcgaccttggggggggagaaggccacgccgccgccgtccttgcggccgcgcggtttccggcggcccgctcgggcggcggcgaggtggaaggagggcagtgggggtggtgtggcggcggcggctgggtcgcctcccgtgtcgcccctgccctaggagcgacgcgggggcaatggtgttacagcatcgacgcactaaatccagaattgaatcggtgttaaagttttgcgggtgtataaaatttccatgttccaagcaagcccttagatgggctgaatttacgtggatgagctaattaggtccaggacattaaatggggttgattacgtcaccccataaaaatatgccgattccgaattggcatattaatgggctaattacgtacgtcgacctcactaatcttggtaactccgactccgaatcggctttagtgttcagttacacgacacaatcggaatcggcgtccgaaattggacgtggcctgcctgcagtggccacgggtataaaggcacactccggcgcgcggcaccagtgcaagcaagaagcgaagaacatttaagaaaaacacgccaagacaaaaaaaagaaatttcgatagtgagacgaagcaaagcaaggcgattctcattc

SEQ ID NO: 6707 - DNA, 2000 bp, Oryza sativa
gcaaagaatggtgcgtagggaacacgcatgatttttgaattgctggcacataattttatcattagaaactggaatgcaacatgtaccctttgtcatggtttctttccgagacattgcactgttttttttaatcctatcattatcataatgccaagaactggtcaccaaccagcaatttgcatcatggttagttgagctgtccccatgtatcaataggtgcattgtattggtccgaaatataaatgcagtggatgcaaacctatctcatggccgtcaacaaaagaaatcaaaagggaaatgcaccatcttatatctccagtttatatgaacagattggataagatcataagatcaagtggtttatattattttgaggaatataacatggattcatcctaatcactcgtctaggcagtatgtgtattcatgatggatatggtactatactacggagttttttcttcacaaaataacctgttattttgacctccaaccaaacacgaattataccaaaaattgggttatttcatctatagtacaactctattataaacatgcagtaaattatcctacacatataccaaaattcaagtgtaataatcctaatacacagacttaaaaaacaaactatttcctttttaagaaaaggaaaaccatttttttaacggaaggaaaacaaattcgggtcaaggcggaagccagcgcgccaccccacgtcagcaaatacggaggcgcggggttgacggcgtcacccggtcctaacggcgaccaacaaaccagccagaagaaattacagtaaaaaaaaagtaaattgcactttgatccaccttttattacctaagtctcaatttggatcacccttaaacctatcttttcaatttgggccgggttgtggtttggactacccatgaacaacttttcgtcatgtctaacttccctttcagcaaacatatgaaccatatatagaggagatcggccgtatactagagctgatgtgtttaaggtcgttgattgcacgagaaaaaaaaatccaaatcgcaacaatagcaaatttatctggttcaaagtgaaaagatatgtttaaaggtagtccaaagtaaaacttatagataataaaatgtggtccaaagcgtaattcactcaaaaaaaatcaacgagacgtgtaccaaacggagacaaacggcatcttctcgaaatttcccaaccgctcgctcgcccgcctcgtcttcccggaaaccgcggtggtttcagcgtggcggattctccaagcagacggagacgtcacggcacgggactcctcccaccacccaaccgccataaataccagccccctcatctcctctcctcgcatcagctccacccccgaaaaatttctccccaatctcgcgaggctctcgtcgtcgaatcgaatcctctcgcgtcctcaaggtacgctgcttctcctctcctcgcttcgtttcgattcgatttcggacgggtgaggttgttttgttgctagatccgattggtggttagggttgtcgatgtgattatcgtgagatgtttaggggttgtagatctgatggttgtgatttgggcacggttggttcgataggtggaatcgtggttaggttttgggattggatgttggttctgatgattggggggaatttttacggttagatgaattgttggatgattcgattggggaaatcggtgtagatctgttggggaattgtggaactagtcatgcctgagtgattggtgcgatttgtagcgtgttccatcttgtaggccttgttgcgagcatgttcagatctactgttccgctcttgattgagttattggtgccatgggttggtgcaaacacaggctttaatatgttatatctgttttgtgtttgatgtagatctgtagggtagttcttcttagacatggttcaattatgtagcttgtgcgtttcgatttgatttcatatgttcacagattagataatgatgaactcttttaattaattgtca

SEQ ID NO: 6708 - DNA, 2000 bp, Oryza sativa
ttatagatataattgtatattgtgtataaatatatcaatcaatctatactgttataatccagacacatcatgatctaaccgttaagatattttaatttctcgctgattaatgtgcaaatttctagtctctggagcgaacgagatatctcattttaaggatgtctgatactttattcgtttcaaaataaacaaattaaatacagaatgtgacacaacctagatctcgtagttctactaggtttgcttatattagaaacggaggaagagcgtatatgagattgcttaggagttgattggtttcactttgtttaatgctgcctggcaagatcaacaaaggtccaacaagataacattccgggtccatccatgaacgagtacgaacggcccaaattcgttctgtcaccgtcgaggagatccaagcgccgaccgcccaggccgcgccgcgtggcggcctggtccgtcgctgcccggggccacccttgaaagttccacttggcatacgttggatctgaacccaacgagatagacctgacacttatcttaagcttttgtagttgtaggcctcacctgccatactcatcgaccaagtgcacttgcgagaatattttgcagatagggcacttatctacatcatcatttttcaacgctcgaaaaagcatatggtgtcctcccttcttggttgtggtggatcaagaggattcacagtggaccaaattatcgacgtttgatatcgcgaatggtatgaaaatcgttggtaccagagtatatgtgagattgtaataaaatagatggagatagggatttggatttttatacaggttcgggcccctgaattgtcagttaataactctactcctgttggccgaagccggtcgttgctcttattcaccataatcacaccagtacaatatttggggtagcctatctaactgttgtcgacttggctgtctgaagtgctaactcgtagttgacaacagggtagctttccttctcgaatctacatccggcgagatcaaagacaacgctatgtctctcctgacaatatccgctagacatcgtaggggactagccatgcttatctctgaagccaatatccggcgtcttgtcttggcgcatgttggcttgtatgttgatctcatgtcttgatctattgtcccgtgtcccctctcctcctaggggccttgtatttatacccatagatgtccccttgtctaagtagaactagggaaatcaatatggatacaatccgagcagtccttgtcgtttcaatgtagaactctattcatcctttctcatgtgaaactattcctatattcaaagattgtttccgtataagacataatatgtggtagttcctgtaaagatttagtcaacgtatgtggtatccataactgacacaagcattatcacgacgttttcacggagtacgcgatctttccatcgccgtgataccaacaaaaaggaattgccgtaagctgggggcaccacctcaccggaccggaccgttctcgatgtgctaaccgaattatgatagtagcgccgcccccgcccgcccacggccgtcgagccggctggaatgagatggcccccactcaccgtacggggtggggcgggccccgcgcttttgtccgcgtcgggcgcctccacggcgaaaagctgccaggtgggcccacggtcccgcgggtcagtgggccgtccagctcacggttcggcgtggcgcggggggcttatcagttatcccagcgctgcacccacgccaccaccccttcccttcccttcccttccgccgctttccaacgcgcacccggcacccccacatctcgcgtattcccgcatgtgcgcacgcacacttgcgtccattaattaatcttctttaccctgcacctgaggaggaggaatggctgatgccccaggcgattgaatcgaatcgggggaggagggggaggtggggagcgggggggaaatctgagtgatcggttgttcctcgtccgatcgccgcc

SEQ ID NO: 6709 - DNA, 2000 bp, Oryza sativa
caagagttccttcctccgtgtcgacattaccatttgcaacaaccatgtttgagattgtagaagaagcctgctgtaggtaagtatttgagtcaataaatatactcagaagaatattctatggacaatctgtcgtgtatctgttttctcaagttccctagataaatggggtatgcatcaccattaaaccctttcttcactggccgcatacttatcttctcttttagttttgcgatttagattagaaattaaaacaacaaattcatggcattaactgtcacttctatatttcctaaattaccagcaacaaaggccagatactttgccaatctaaaatcaatcagatgctgacaaagctaaagctgatatcaactacaaggtgaaatgtatagttagtagatatgccaaataggcaaacactatcctgctattcgaattagcaaaagattaactctagaaagattatgttgttccaattttctggaaatactagaaggatctagctccatgagctactattctagtaagcagtaaaaacataaaaggcagtgatagaacatcgccaatcgaatcatatgtacttcaccagaaccctttctagtccaaaaaccaaccctacatctctgaaaaaaaaaatcatgtttcagacacattgatcattacatgtaagctccctagaagaactgaggcagaaacgagctttgtactgtatctcacttcttaaacaacaacactacgaagatcctagtcctagcgctctcgacagaacactaatcgacaaaccccatctcctcgcacgggcagctctgcatacctccacagtggaggtagcgggggtcaatctacccaacaaactctgaaaattcggcaacatcggggaacgtggagcgccaattgatcctacacgctacgcacgggtctgaagcgccaaaccacgatccggcggcggcgggggtgccgggcctcgtcgtaagcagatccccgcggcgagcggaggagctataggatcggggccggaaggagtgaggaggaggaggaggaggaggagggaggcgtgcgtaccgcagattcgagcggaggagaggagaggggagatcgcgcaagtttcgtcgccccacccccagcgaagaaggcgatctgggtttccagtcagattagcggttttgttttgggcgtcgtcgtctcgtccccgatttgatccgccatgttcgagagaccagggggtttccgtcgtccacgtggcgggatcggacggcccggatcggcgtgacagcgtgatttgttcctgtgggccccaccttgtcgaagcgtctgggcacgttggccaacgtgcaccgccgtccagactacagcatggccaaggcctagtcggagactcggagtcctcctcggcttttggttgggcttgaagcccaacgttaaccaccattwtgggccttaggcccatatgcacataagagttttatacggtttctgtgcgtgcatatcatatcatatcatatcatattaaatccttaggtttcctgcccacagtaacaccctacgcgagaacgctgcattctgctacagggtaacagttccatgccatgcgtgagccgttggatctttgagagctggtatgatctggccgtccgcctgcttgcttgtgcagttgtgcatcctcatccactcgtctccccaatccccatccctcctgatccccaatccccaatccccaatcgatcaatcctcacttccccagccagcccgtctgcggagaaatcgatcccgcacttcctgcagccgccgccgatcccgcatcgctccaccggctactgccttttctcatctccaaccttcgctcttcccccacaatttctgcctgtctacggctgtggggttgcctgctgctggttgtcgttcagcgtccatcgggcaggcagcagcgttccagtggatctcattgacgccggccacaacgcccggttcaacaccgcattccccttggctcaccctctccggcg

SEQ ID NO: 6710 - DNA, 2000 bp, Oryza sativa
atccacgataggtgtgacagtttagaggggaagtagtcaagctactaactaaagtcgctttttcatggttatgtttgttctgactttcgagcattttgaattttcgatttgtaggtgtgagcaagagagagatttgtgactcaatctgtattttatttttgtcctgtagctcactatataaggttgagactaatagcacggagataatatcaggagtaatagtcaagcatacaaatggtgtagggcgacttatttggttacaccctattaataaatatgatattgtttttattttataggagtttaccctatggtaacaaggttatgttcttttctgcttattaatcagattattaaatcgaattatttgctccgtgttctgaaaaatatgctttgtatacaacttgtttaagctatttgtaaagttacttttacaaaatatagtttattttgtagtcaaattgataatctgctcaaaaaatctaaattaaattgcacctctatatagagtatatccatgcttttgtataaagggaatctgttagggttatggataccacatacctaatagtagttgactaaatctcggcatgacccaccacataccatgtcttatacgggaactgacttcggatatgaagggagttccggataagaaaaaacaaccaaagttctacatggaaacgacaagaactactcggattgtatccatattggtttccctagttctacttggacaaggggacacctatgggtataaatacaaggcctcctaggaggagaggggacacggaacaatagatcaagacmgaagatcaacatwcamgccaatatacgccaagacaagatgccagatatcgacttcagagataggcatagctagtcccctaggtacctatggctactgttaggagagatatagcgctgtctctgatctcgttggatgcggattcgaggaggaaggctaccctgttgtcgactatgagtaagaacttcagaccgccatgtcgacaacagttagataggctaccccaatatttgtactggtgtgattatggtgaataagagcaacgaccggcttcggccaacaggttgtagggctattacctgacaattcaggggcccgaacctgtataaaaatctgtttccgtctcttttactaagtctcgcgtatatcctagtatcaaagatccccatactatgcaaataccggaatcgcgacatcaaatgtcgacagaatccaaatatgaaaaggatagtgaacgtaataaccgagtactcgattaaatcttattcagtactacgaatctagataaagtcaattagacaccacttaatagactacgaaccaggacatgtttcagtactacgaattacgaatttatggtactaaatggtatctaacccagtatgatagcttactatattttgatacggataaagtagttgaataggtaattaatcattttaacattaataatgagggaataaaacattatgaaggagctgatatagctactccatccatactcgtacgcaccagctaattaaccacttcccaaccttggtaggaaaacctacgcgaccaaacatttccactacttgtcctactactaacatttttgttcccatttcgatacccactttggcactttccccttcaatttaaaaactgtcttgcacgaaaacaaaaaaaaaaacaaaaacgaatcaaattgaggccgtktggccacagaagatcctggcacgatctccgaggcagccagccttcaccaacccctcttccccctctcagtcacgacccgtccaacgcgatgtttycctttaattatatatactcgctgcgggacgcacaaccccctttccaraattcagcgaaagagagcgaatcagccaytgcacttcttgttcttgttctcttcctcctcccgaatccgatccatccattggccgccgccgccgccgccgcctcgtgcgtcgcgtgttcgtgtccagagacg

SEQ ID NO: 6711 - DNA, 2000 bp, Oryza sativa
ctttcgcgattgcaaccaaacaaaccccaacccccgtcgccttcccaaatgcccacttccaacaccaagggggatggatggatggatggatgcactcatgcacgcttgcatgcatggctggatagatggatgataggtcgatctatcatccacccgagttttctccttcccaacctagcggatggataagctcgtcgtcgttgtcgccaccgccgctctcttttcacattctctttgcaaaatatctatactgtttttattttaaaatacaataatttagtatgagatgtaatacatttagtgctgtgaatctaaagacagtgatgaaaaagaaaattagcataacgaaaatataaatatgaagtactttctccgtttcagattataagactttctaacattgataacattcactttctgtgaatgttatcaatgttagaaagtcttataatatgaaacggaggaagtatgtacgaaatccggttttaaaatgtaaactagtatgatggcccgcgcagattgcgcggctagcatcattatattttctctcatataatagcatatatgttttctcattatattattcaaatatattaaaatgataacataattttaatttttgcaataactttacaaaactactaatgtgtaatattcatattatattttatatacctgttagttattaattatttttaatatcaaattttagttatttgtaaattatatattcctatatagactttagactcgtcttttaatatttcatttttttaatttcgcattttctgtaaattgtatttctatatagactctatgcttttcttccagtattatttaattttatttctgaatttttattatttctaattgtatttatatgtggactctaaactcatctttcaatattctttaatttttagtttcgaatttcagttacttctaaattgtattcctatattgactttaaactcttcttcccatgtttttcttaatttcgaattttagttatttgtaaattgtatttttatacggactctaaactctacttttaattttattatgttcattccaaattttagttagttttaaattcctatacgtactctatactctatttctaatattccttatttttaattccgaatttcaggttattttctaattgtatttctatatggactctagactctacttctaatattcccctaatttttaattcygaattwcagtatttccgaataatttctrtatggacttagtctcctcttctaatattscttatttttcttaattccgaatktgagctatttctaaattgtatttctatatggactctagttttctcttctaatgttacttattttttaattccgaattttaactatttctaaattgtatttctatatggactctgttttttctttttctccgattaatgtaagaatttctaggccatgagaacgaacgtgggagctactttttctattactttaataatataatagattttgttggcagctcatgagtagtaaaattattttggcactataaactgaaaaataaaatggatggagacaccgttctcgtcttgggttaaccgctccaacactttcataattgagttttcaacggattttattttttttcctctctgtgtgtgtttgactgtacggaatgagaaggattattcaaatttcaaacggcacagggacccgccggcccccgtgtaacaaaccaaaccaaaacggccttcgtccacactactccagctcgaggaggaccgcgtggagctccctgacacgtgggacccaccaaacctcttgtccccacccgccatccaggtaccgaaaatgacgcgcctcgccagctgtatgccaccgtctccttccccccaccgcctatataatcccctctccctcttcctctcgccatcgagtccgacacgtccacatcgccattagagcagctcgaggaaggaggaggaggaggttgattcg

SEQ ID NO: 6712 - DNA, 2000 bp, Oryza sativa
ttttttctttactgagaaacacaacataaatgtagactctcacaacgcatgcgcactcacccatatgaacatacatgcacacgccatacccctatgagcacctctggaagagtggaccattatatcttgagattgacgaggtcaccatgattatttcgcggtcgatggatacatcactaaatgcaacacccgtgtcaagtttaggaattaaacatggatggccttgttccaccacaaaggacctatctagtcggctacgctcaattcccaaacaaaacatatgaattaaaaacgagaccgccatgaaatgatgtacctcaaattcttctaactgaacacaatagtgaacgagtccctataaatcctcatcaattagctgatgaatacgcaagtatgtcgggagagagggcaagtcaaaatggagcgttattccttgattagcgtatggtttgatgggattgcctgtgaaggttaagtttagggcaaatttggggccattacaaaattatcgtttggaactgcaatatatctatttcttaaacaaatcattattttcctttcataaaaaaatgaattatgaggcggttcagattgatgatatttttaaccataccatttttttggtgaaattgctaaagatgtgcatatatttagttttttttatcaaattttggcataagatatccttccaaaaaattttggtaatattatcaacgtgctaaaatgttgacaatgccaaaatttgataaggttwattttagctataatataaacaatcctacatgactttcttataaattagggcctattcaatttgatgctattttcaatcgtaccattttttggtaaagttgccaaaaaaatatctgtgtttagttggttgtcaaatttgataaatatataaaaaatcttgccaaaattttaacaatattattatcttgccaagtaaaatttttaatctgaatatgcccttgatcttctctgttaccgaacgggcccaagcatgggccaccgctgatgagactgacacggggttcgccgtacgaagccggccattccgytccgcggctcktgggggcgaacaaccgcccctgacacacgagtcactcgcgcggtacgacccggtcctcacggctcacgccatcgcatcgcactcgacaccgtcctccccacgcgggggctctcactgagaggtgggcccatcaggtcatacccacacgacaagtaacaaacgccccagtccaggagcagttgggcccgtaccgccgcgccgccgccgcctgcaacccgcccatagaccggagcccatccccgccgtgcgttcgcgcctcgagatcgggcgtaggcccggtccaccgcgttgcgcccgtgtccccacacgccagtgggagagcccccgcactgcccctcaggtgggcgtccattaatcgggaactccacgcgccgctgcgtcccttccccctcctctccttcctcctcctcgtccgccatctcaatcgagagagcgagcacacgagagagagagagagggaagcggaggagggagaagagatcagaggaaagaggaagagagagagagagagaagagagagagagtgaagagaaagagtagcgttgatacaccgtcgaatcgaatcgaatcgtgccggacccccaccatcgcctcccctctccccatatcggaatcggaatggggagcatcgcatcccttccctttcctttccctcttgcgtttgcgtgattcgtacggtttatcaccgcctctttctcttccactctccccgtcgcatcgtcgtcaccgccgcgcgcgccgcaacgcccacgcccaccggaagtagtagcagcagcagcagcagtagtagtaccaacattcgttttcccctcctcatctctcgtcttttgtattctgctgcttctgattaatggaggagtgaagtggtcgggtgttggtgtggtgctgtgtgactgcttgcttgcagctgctgttgacggcgggagcg

SEQ ID NO: 6713 - DNA, 2000 bp, Oryza sativa
tatgaaacacacaacaccatgtctgtgaagtagcatctcattttaacagcatatccattcaaggatcattattttccttactccttgacctgtgcctaagctagtaattatgctctgagcttgctgcagatgcatggtgttgtcaatttctttgggcgagttgcattccttgttgagcagaacacacaagcattctatttgtttatcacagctatgttgcaggtattttgatcttacggcttcccttggttttggttctaaatttgctaatacttacacgaacttactgagttcttgtatcgtggtcacgacagctctttgatcggtctgggatgctttatggcgaacttgccagatttgtcttgcgcatgttaggaatccgaacaaagtcaaagaagggcaaggttcagggcccagataccccagctttcgagggacctgcgcagcagttcattgaggcaccaaaagggaacaactcatgggacaacgtttggggaaactgagacgccttctatataatgcaaaatttaagttgaacatacagtttacaaaggaattatcatggcatgagaggttgcatgtcagcagtgaatcgaaacgaagagtactgttgttaaggtgaattacctgctggaatcgggttgacagatagatactctactttctgaatttcacgccgatctgtgatatatccgagtcctagtggacaggtccaagatgttgtgggcaggtacagtttttgcccagatgatgcaatggtatttaaagtaagtatgttgtatcttgtgggtaatcaatactgtacctggaagagttgggcaaaatgtattaatgtatcgttttccttgtttttcatcataacatatggagttgattttgactgaagtttgcctcggacgtgctggtggagtggtggtacttcatcaggactgtcatgcaaatgctttggtttgttctctgtacattcctggtcactgagaattgcagcaacatataaactcaaatctccaattgtttccgctacaaattgaaccaaacaactttgtgctgaatcatctatatcacctgatagtctgtcgactgtaccgcatcggagcaggttaaaagcaatcgaatgaacaggcagtgcaggaaaacaactattccgaaaaactgtcatcactaataaagtacccagaaaaagtagcaaaactgccaaaaccgccacgtccgtagcacgctaaaacctctgatgaattccgagacaaaagctgccgcagttatctccaacgaaaataccaaaacattcggcagagaaatggacaaataaaagccattttttgtgataaagggaggagataaacccagtgcagaaacaaattcctagacaagtgaattttcttttctggggctggaagagcaggaatggaggtgcaggagaggatgaggaagcagtgtaggagagccatcctctctgcacacctccaatagctcatccaaacaacagctatctcactctccctccatgtctctacactctagcaattcaacaattattttcctttgttttgtcttcatctacaaatgcttggtcatcaccctcatctcttatattactctcacttccaccacaccctccatttcttgcttccatttgtcttgcttggctcttcactctccccctgttcctgcaggggtcaggcactgcctgctacaaggtaaaaaactcactggagattaagaacaattattaatttcattcttgattcagtacatggtccaatttacatgctctattgaattgatggtgtcttaatttggaaaacattttgcatggatggatttcaacaagtgttctgatgatgaaagcctgactgttctttactttcttcagacaaagaatccacttgcatgtagtagagggatttgaagttattcttatgttttcttggttaaatcaagcagctgttttcttgtttggtccagagtggtgtaggtgattcggctagctcagcgcgaag

SEQ ID NO: 6714 - DNA, 2000 bp, Oryza sativa
ccacagtcaattcaccactttccattcttcactcaccaccgctcgtactaccaccacccgcgccgttgaccgcactgcccccggccccacccgcagcctcactgtagccggtcaacgggccctccacgtggcgtatctgatcctcactgcgtcataatggcgccacgtctatttgtaatctgtgcgaccgactcttgtgtgttcgtgctcgtgcgtgcgtataattgggggtggagcagaatccgccattgctgccgctcgctctgcttcttcttcttcttcctcctccaactcctcctccgttgggacggcgacgagttgagtttgattctttgattgatttctcttctgattttcctcggtaggtgaggtcttcgaaatggtcgccatgatgtgttggtgctcatcttcctccttgattctaacgcctgcgtttcttggcgtgaagcgaagggggaggatgtggcgctctgccttctgcgattgaagctcgattcgccattgccggctacctggggaacgggaacccggacagggcggcgcctggacgaccggttagaaatttcttgcctgaatttagctgttcttgattacctgcatgcatgcgtggtgaatgaatgcgcaacaatcgtttcgtgtgtgcttctgttgtttgtgttggggaggagttcttggatgttcggctatattattggtggtttagaatgtttgggtgcaaatttctactctttaatttgtgctgttttgctgctgttaaatttgggttgtctaatattgttgccactaattttgtcatttcgaaagttagtactattttatcccctgtcttccaaccaagagaaagcagaaactccctgcattatttgatatgcttctatgctagtgtccgatataatttaattgcatcgaatgacctccttcggtcattccggcaaaataatttaattgcatctgacaaaagaaatatatatcaatcgacaattgagttgcatagtgtaagctgtgatgaaatgttcaggtgttctggattctatatcaaaactcatcctgctgagcaaatagtacaacacatacgtgagaaaaatgtgattagtattgctggacctactcagacaagtagaagtctgactgtctgtgcaattgataattgtgtagtaacagatcagtcctgagggattgcaacaggaacagttgcctctgtcaatcttctctgcttggagaatttcatagatgtatgttataaggaatcacatctggcaaaatacgccctttcatataagttagacaaagttggatcaatgttgttgtcttaccagttgctgatttgttaggactggttcaggatttcaatagaattgttcaactttcccaattattgcggtctgaacaaacctgcttggccttttcagactgaaaacgagagtcttgagtttatctgaagtggcactccagcatattgtccatgttcacactgaacataacagccaattgatgtctctccctgcaatatattggacagataaataatactaaaattaatagctggcaattgagataaaaagatggttgtttttctatatcggagtttcaccgaacagccacaccacccttgacagtgttttgtctgaaactgaaagcatttatcactattccatattttgtcatctgacccaaagatttatcagcataaaatttattttctttctgatggtgtacaaggattcagttgggaactgcgggattaaccaactttgtttaatttattgttgttgcatccattgcttccaagtaaatactcttccttagtattttgcaatttattttattgaccttttatttggaagtatatcggcataccgctccttaattagtgtggtttgccctggtgcattgttgcaatttaggagtactttcacctatagcttccatagtttcttctgtagctaatgttaattccacggttttcccagatcagttaaaagttaattcagtaatcagat

SEQ ID NO: 6715 - DNA, 2000 bp, Oryza sativa
atgattattaccagctccccctcagggccccacctgtcatcctcccagtgacggagagagagggattggtggagtggtcgctctcccagcttttccgccccatctgcccacgtacaccccgcgtgatcccctccctccaaacccaaacccaaacccaaacccaatccccaccctactccaatgattccccccctcctcctcccctccatagctcgcaccagataagccccccsgcctccgcctccgccgccgcccacgccgtcgccgtcgccatcgcggtcgtggttgtgttcgtctgttcgtgtactctggatcgatcgattgatcgggcgcgggtggaggaggaggaggaggagggtttcgagggggtgtgctagggtttcgagtggaggtkgggggaggttgagctcagttcattcttctgtcgccgtggtgggggcsggggargcggagccggatgctatgctgctaggctgctcgtccctgacgtcgtgggtgcgtcgcctcgtcgcctgcgttgggtacgcctttctgactctccctcaccctggctgcttcggtgttgtgctgattgacgcgcgagaatttgatttcgagtgttaggggagccgccgcgggatgatgaggcgagtttgatgcgtgcgggtaggcgcgatttcgttggttcgacgggatgaattcggtgttcatacattgatccccgttcggatttcatggatttagtaaggttttcgcgattttgtttgtaaccatgtgtagtgaccagctcgtgcccaatcagcgaggttggttatgatgggtctgacctgcttgtaatgacctggatgattgctcgatgtgttctctgtctttttgtcgatggccattagtggcacaagagaatgtttggtggtttcctaccaatgcaggttatcatcatagcacttttggccctttggcctgctgctgttaggtttcctttcagctccttttttctgctccctgcagcttgcaaacagcggactcaaggaggtttcgcataataaagctgataacacagaatagcgaaagatttcccccggtagactactattgcagcgtatatttatttgtgcctgcttattaatccattgtgtcatccaaaaacttttctttttaactgcagaaaaaaaaatgaagttatggctcatttaagaattctggctgctattatctgggaaatttacttagctgtagtagcgttttatatctaaatgctggttcaatctgtagagtataactggctagagagtttgttgcttgatgatatctataatttgaagggtacaggtttactggtatttgcaaatgagtacaatcttaaggatatgttaacttcactctaaatacatgtaggcttgaatccattgattggctattgctccttcaatcaatgggaaattcagttctgcatttttgttctacaatctagataatttgtataaacagatttatgctacgcacaagttgaagtcttattatgtttttgttggctctacctagaatccttgacacctgcttattccagccatttaggaatgaccagctccttgaaacctgctacttcaatttaggcaccatttatagcttcaaacatccaaccctattcctgtgcgaattgaactgttttctgttgcttcagcttcttcgaaccaaatgaaaaaaaattgaacatttatagtgaggactcgtaagcagtgcaaaacctgtactaatcaagtgatcaactatatgtattttccatacaattttggtttagacaatcctttgcttgtttgttgatctgtaacttctctcaattgcttggtgctaatcatttatcagtcaatactggtttgcaacagagcagaaattgttttggatgtgcgaaacctactccaataatagccgttgatgagccttcaaaaggtttaagaattcaagggcgctcaataaagcagcggagtttgtcggaggacttttggagttcaagcccgccggga

SEQ ID NO: 6716 - DNA, 2000 bp, Oryza sativa
tagaattacaatgtcttatattaagaattcctatgggaattagaaatgtaggaatactctaatatagtcatttagacgatatgcagaaaaaacagagaaattatagacacaataagagagaactgtgatgtacaacctcatgttttgttttcttccaaaatttctatgaactagctcattccatgggttttccagaggaattttcggacatatatatcctttgttttgaatgagttcatcataggaagtttatcctaagaatttaaatcctctaaaaatccttcacattttccctttgttccaaagaaagcccaagtgttttttttccccttttcagggtaggttgggtgggcaattttaaatatttttacctttttcggttttatgtacacgagattcagaggtcatctctataaatgaatgctgatggatgatcatgttaactataggaatggattaaatattatatgaaaatttgaaaaacacccacaatagccgagttaatttgcatgtataggttgtgtttagttccctcaaacttccgaaaaccaattgcacagtttgcatgtaaatcgcgagactaatcttttgagcctaattacgccatgatttgacaatattgtgctacagtaaatatttgctaatggtggattaattaagcttaatagatttatctcacagtttaccaacggaatatgtaatttattttgttattagtctacgtttaatattttaaatgtgtgtccgtatacgtaaaaaaaattaaaagggaactaaacacagccatagtattttagtttacccatatttatatctcacctccatcttcacgaattaataggaataatctcaaaggtgcatatgtcaatcagctagctcatgtgggatgcatgcatgtgtacaattgagcaaaccctactccagggacatctggtctaccgagaccaccacctaccacgattcatacgattgattggtttagctagccagaaattaattggcaatcaaacagtacaaaaacatccatccatgttagtatcatctgctacactcctcattgccttcattatctttctctcttcatctcttgatcagctcttgacgatggtttagacgacaggccgtacggtgcacggctggtcatggccatcactcatcagtcatcaccaacggcgccacacattccgtcttgtactacaagattaattaattgaaaataaaattgtactacacgagatggccccggtgggcccacctggcagccgctcacagagttacggccgcagaggatcccgagccccccccctaaaattaaccaaccaaaccaaatcgcgtttaatttttcgcgcgcctcctctaaacccgcctagcttaaaccccctcgtccaccgatacactgacatgtgggcccacacccactgacatgtgatcgcccaagccgacccgggcccacatgtcatcgactcatcaagcagccagccaaccgtggtagagagattttttgaaaaaaactggaagccacgggcccctacgcctacacgtacccccctacccaccgggtccactcactgacgaggtgggccccactttgtcagccttcctcctcctcctcctctttctctctcctgccaccaccaccatggcaccagctcagctcagctcagacacccacacagtgagcccctctctctctcttctctctcctctttctctctcttggttgctgctgcgtgctgcggtgcagtgcagtgcagcggctgcctcccgaaagcaacaacagtcacgtcgctatcggcaccacccccacaaaacaccattgctcccccccatcgatcgatcagagctcagagaaagagagagagagccatggtggtcgtggtggtggtggtaactcggccagggtcgatgcactagtgacacaacgagtgcgagtgccctgaaaggggggaggaggagcggcttgagagggaataagctaggtggtggtggttcttggatca

SEQ ID NO: 6717 - DNA, 2000 bp, Oryza sativa
cactttaccagattgcatagtttagaaggaaggtgggttagcgcctccctagcctaggccagatctgaggtcctgtgaggaggtccacgtgtccaactgtccaccattgatgccgatatgtactctaagagaggctaaatattcaggctagactctgtttgggtgaactgacccaagacgaggtcgtgccctcggagcttcttaaagacagtctcacatcctcaaagttggtgcataggaccgattggctggccaccggaaactagctaggttgttgcaccattttctgttggggaccatgactctaggttgctcgggaaatgccagatatgcattggacaaaacaggtcaagcagagcaggtgggtcaccccttccatgggatgttttgctgctaaagtaaaaccagtgtagagtttaatgagttagctagggtttatgattatgtacaatatcctttgcctcggggtggtggtggttgtgggggggttatctataatgtcctataagatcatttgggactctatagacgatattcaaagatagaatcaacaagaaatgaaggattcattcatagctagctcgagtgctccacaacttagtacaaacgttgttgatagtgacctagaacagtagtagggttgttatcattcgggaggcccgaacctgtatggttcttctcgctcccaagcactcccaaacacaccgagtgcacccagagccccttatcgatccctaacatgtgatctatcacgtcagcgatcccgaatcaaattgcatgggaaattcgactattgtacctattataatatattctacaaaaccctgtagaaaaccaaagaatgatgccgacgacattggccaataaaaaactgaacccataaaatcattggctatcttctcctagattccattgcaatgcatggacatgtctctaagtaggagagcatcctaccttattggctatcgtttaggagtaggaaaggacatctatgatcctacaactgaagtctggctaattcaagatctttagcccattggacactagggtgtgaagacccgatagatcgtgggtgtctgctggactgtgagctcgagggaccgttgatgtacagtgaatggacagtgaacgggtaagaggcaccaatttatatgaatagagagattgttgaatagtctcacatacttcatgtgtgaaaaaagggccctctcgatctccctcaacggcaaccgcgaagccctgctaactctgaattctgaataaagaattctcgtacagctagttcgctgttggtcccaaccggtctactggggccaatccactttcatgtgatgtcaagttgggcactccaggggaaactattttcatcctcaaggggatatcccctcgttgtttgtatgtcactataatggttatgaacaaaattgaaaaaaaaattgagaagatgtattaacatgtgatatatcactttacaaacatgcaagttcaaattcaacttctacatctcgtaacgaaaaaaaccaatttgactataaatatacgttaactagttgtagtttaatttgtattttccgttgcgagatgtagaagttgaattttaacttgcatgtttgtggagggatacatcatatgttaatatatcttcttaatttttttaattttttcataaccatttacttcctccgtttcacaatgtaagtcattctatcatttcccacattcatatcgatgtcaatgaatctagatagatatatatgcctagattcattaacatcaatgtgaatatggaaaatgttagaatgacttatattgtgaaacgaagggagtaagtgacatgcaaataacgaggggatgaaaatccactcccgcactccagtctgtgtttgcttgccttctcaaggcactaactaacttagagttaagctataaaagcaagcaaacatacactattatctactagtacatccttaacatcgatcaatgcaaccaccacaacgtac

SEQ ID NO: 6718 - DNA, 2000 bp, Oryza sativa
ttcacataaaaaaaatatggacccaccgacattgggggtgcccacatgccatcctctctctccttcctttcttcctcctccatctctctcccttctctctctttctctttctctcccttttctcttcgtctgctaggggcgggcgctcgagggccggaacagtggcggtcgagagtgcgggagctagagcggcggcggcggtcataagggcggagccagagtggcggcggckggcsggargacgggcactagagtggcgatkgcggttggtkggcsarggcccgagcggtggcaaaggcaacgggcgggcggctargcggarggtgctcacgatctaggtgccaccgcctctcccctcaccgtttgcccccctycccctatccctagcaatagcttcgaacggcggaggagaaggcgtcaacggatcctaggatggtggaggaggaggaggcagtggtggtagaggagctagcttgatgacgtggagggtgctcgcgagctcagcgacattgcatccggtgctcctctgtggctccctctcgtgaggctggcttcctccctcttcgctatggcggccaccatcctactgctctatctccgctctgcatccgctcgcatgccaacatcgtccaccgcctttgttcccacgcccagcttcggtatcatcaccgccgctccaatgctcgcccacctgcccactgccacmactttgccccaattccgctggttgttgctccaacccccgttgctcacatacggccgaaggggaagagaaaggggagagaaagaaagagggaagggagagagggtggaggaagaagggaagaagaaagagaggatgatatatgggtcccacgtgtccgtgggtcacacaatattcttttttaatgacaaatgggtctcacatttttttwatttctaataccacataagtgccgcgtcaatgctacgttagacgaagactaggccaacaccgccatgtaggggccacgttagcaaaaccgcccttcaaaaccgtcgagagggagttaaattgcatcgattttaataattgtgggtttagatatccggtatcgtggtttaagaatacgaattaattcagcaactagttaagggagtcaaagtgaacttattccttaatactgtactgtacatgtgctcatgcgaagcccatctcggtgtgcccaagttaccgtcagcctttttcctacaagaagttagcccaagttccatcccgaaacagtgctgtgtatataccgccggttcattggtcgcgacacgagagaacgcaatcgctaccgcgaccacgtccacgaccatgatctttcctgcccaccctgcacctttaccatctcggcgttttgccggtgttgctctcggccgaagscctytcggtctcgggggcccgcctcaccgtacggtcgccaatcgccacgcccacgccctcacccgacgggccacgactccacgagggaacacggcccacgagccaccgaggcgaacgtgcgcgcacgcgcaggcgcggcaggttcgcgttgggtgtgtttcccgttgaaataatgcttcggtcctccactcctccggcacggccaactcgtgacagcaacgccggcccagccgaccgggaggatgcgaatgcttggcgcgtcgcggcggtgcggcgggccacggggacaagccacacgagggccggtcgaaatcgcggcgccatttcagcatgatgaacaggagctcgacaattgctggcgccgatccggatgatcctactgcatgccgtctcactcccatccatccatatccattctctactagcgcagattgtggctgacgaatccactccctttggtacctcgccatgggcccgctagctatataatctgcccaaactaagtaattcccaacacaatcttctacgacgccggctcgccccttggcccctcgcttgaacgcttagagatacagtttttgccgcgctagttgatccctcctgcattcgcacc

SEQ ID NO: 6719 - DNA, 1933 bp, Oryza sativa
ggatattttttgaaacttgcatgttaaaaaaatctcatatctattattctcttgtataagtgaaattgtttttgctattacaagaaacacacatgcctacacaccaccacgcatgcacaccatcacacacatgcgaagcccccccccgtccacctccctcccaaaggccctaamacacgcttaaagagacggacccaaaagaaaaatccctgacctcactatttgattcaataaaaaaaataatgtttagcaaaacatttcaccaattcgcaagaaaccrgaaaaaaatacttaaaatatgacmtaaaaatttmaataaacmcatctcctctctgtgttttggagtaattgacyctattgattactgccttattgccatctcacttcgataaatgaaagttgtatgattataatttttgacgctgcacgcttcgatgacataacatattttcagctgtttatgatattttgctaaataaagtggtttgaaattaaatattttcagtgtcaattatttaagaaggcaggtactatcattttagagcatgcatgccatcatcgaagctcaaagttctagcaacaattaatagttgcactcttaataatcatatccatggagtatcataatgcataatatgctgcagagacaaatccaagctcatattctgcagaaacmaacmaaaaagatttggtgcaaatgatctggggacatagcaggaaaagtgatttaacgaatcctacttctcgcaggggcaatcttgtactcacaaaaaattaaatcctatgtcaacaattaatgttaaactcacctttattcctagttttaagctatataaacaagactagccactttgttatcattgccctctctcagctcccaaaaatctcactcatgtttgattgctttagttattctccatcaagaggttgaaggctaaactactcttagttcaatgtttaactaaacatatccatacccatcactttggtaagtatcatttatgtgccacactatatatgtatatgcacgtcatttattttattggccacttttctagaaatcttaacccccttttcttacaaattcatgtgttgatgggtatattctgtggatttttattattatttggcatttattatggaggatggattcgaaggtaacatgtagagtaaaatacattgttggtccttaaagttgttgtgtgatgtcatactagtccctaaactttgaaactttgaagatggagtttgdgaggwggggggggggrgagagagagagagagagagagagagagagagagagagagagatggtaaccacaccagtatccgaaggagtatttggtattttaataagattaggatgtgtacttttttctcaaagttaagggatcaacatggcaccatgcaacaagtttagggagcacttctagtgtattttaatctttacttaaatgtgggaaaattatgtcttttaagtacactgtaggtcttgtgggagctacttttatggatgtgcctttttgtgtggcaacactatgttcaatttatttaggatattgtgcttatgtagtgtgattaaaatgatcaaatcaaaattgtgattgatgtcctaacacatactcctttgtcccaaaaaaaccccccaatcctagggatgtatctggacaacgtgtatgtctagatatatatctaggattggatttttttttttggacggatggagtactactttaattaatttcacaataactatatttggaattcgaaatgcaaagttcctttatctatgttcttacaactatttctcttcatgtacttgatttctggagatggcttccaagatattgtaattaaaaacacatccctcacagcttccatagacgctactaaagtttgtggtgcatatcaaagaaactattgttgacaagagc

SEQ ID NO: 6720 - DNA, 1109 bp, Oryza sativa
  misc_feature (1)...(1109): n = A,T,C or G
tawatntntntatayatatatatatagaggttcttagaagagaagatggaaattaattctgtaattaagaaatggaccacgtaacatatatgaaattatgaaagaaactactatcttcattttaaaatatagcaatttaagatgagtctaattacatcctaagttgctacattatgtaatcggaggggataccaaattaaagatatatagctcatatatttttttacataaaaatattttaaaataatagtgcttattagacaagacccacctcaccatcacaactttttttaagaatgtttatatacttaaaaaaaaatacccgtgcgttgcaacaggtaaatgctattttaattttattattgttatatggtttagctagggtaaaatccactgtggaaattcgcttagatattttttcagaaaatcatgagctgcaattaggagcccatattgtctcaagttagcatgtgagttttttcaaaatatttcttatacgactccttttatacttcccaaaggaaaaaaacttaaaatccaattcaaacacggatctgtatttccaaaaatgaacaaacttaaaaaccgtggatgacatatcaagatactagcaaaaatatttttaatttttataatagtagtcataatgtgggtgtgtgtcggtgaggtgggcctatgaatcagctggatcatcggccagtcaggtgtgaggccctcgggctcttctcagtgggctgcatttggacttggctttttacaaccatgcatgggctcatatacagttgataacctacactttttttttattggagagcgcatttggtagaaaacttccgcaagttttttacaccccaaaacttttaagatggaagcaatttgatctggtactacatacatacgtgatgaaatttcaacaacattttctcttgtgctaacaaaaaaatcaccatttttcttcttcagaaaagaaaaaatgaaagcagatgaagtgatgagatgtaggcgtctggctataaatacggatctagtgggaaactcgagattagtatcagtatcagtataacctaacaaatactaattattaatcacaagctagcgagaaattaatc

SEQ ID NO: 6721 - DNA, 2000 bp, Oryza sativa
caccggaggttctcgatctcttcgagccggtgtgtgtcgaaacacttccgctcgcggttccggaaaatccttccgaagctgtcgccgcctgaaccggtacctcctcaacgacagccgtatgaaccggtacctcctccacagatggtggagttggagccgatccggaggtatcgtcaaaccccgacatgtagttggggtcgaaatcacccaaggtgaacgacggcgactggtatggaaagttcggatccattctgaaaatttaaaccgacataaacaaattttcgaatatttattgaattcacaaacacaatacaaataatacacaaatttgaatattacttacatctttccaaccgcgagctcttcaaacctctgcgatcaaactgttgaactacgaaactaattttgatttttgacaaaatttgagcaaattttgtcaaaatcaaaaaaaatgcacacttgagaacaaagagagcacttaaaacacttgagagcacaagatgaggagtgtgggatgaggagaaatggctggggttcatgccctatttatagggcgaaatttgagattttttggaattttttcgaaatttttatgaattttttagcctcccaacggttattttcaaatttgaacggtcaaatagccgttagtgccaacgtggcgccttcccattcgaccgccgccctgccmygtgcgtgcgccgackggcccggcttdcggscygwsssgycgccgtgcgaaacgggccgtagccgtgccgcgggccgtgccgtgccgtgccgctacagtagccgtgccgtgccgtgccggccctgcggtgctcggccagcggcccaagcacggcacggctactcgtgccgtgccggcacgtgcccgttactgtagcaggccgtgccccgggccgtgcctgctacaggttcggcccgtttgccccgggccgcccgtatatggcccggcccgtttggcctacctctgatctgagaagcatgggctcacagaaaaggaaccatctggcttttaataaataaataaatgcagtagcaaaggtgggcttctgcttccttcatccacaccaaaagcaagaaccccaagaaccgcagataaaaaggggagcaagaagaactttgctccgatccgccgccgccatctgctccctccaccccggtaatctgccactcctcactacttggttttgttcattcatcttggcttccaagtttcaacatccaactctcttggggaaggggggaaaaatccctcctttgtttcctctctccaagaagtttgggagggatcccctttgatcttaaacaaatgcccaagttcgtcgcattcaacctttccggatctctgtaggggtattgataaaaaaaaagataagagatttttagggagtggcaaaaaggagtgttttttttaaaaaaaattttggtcaacttattaggattagtgttgtttaacacatccatcgatgaggtggcatctagcaattttgtggttactcgatccagtgcttcagttgttcgaatcagttccttgtgatatcctcgtttttttttattgctctcatttgctgttgtaattcaggattttttatcacctgatatatatatctaaatttattcccctgttaccaatttttctctccatgaatcgttcggcaacgagatcattggaataatttagtttttcttcacgaggtcttttacctttgcactgtttgctagccttccagactactcctgtttggtttggtggtgaagtggtgaacaccttttcatcaaaaagccaaaaaagttcttttaagcttgacaatttattagttgctgaactaggtaggttgatattgtactgtagtagccattattttctcctgttcataagctaacattttcttgatgttagtatttctgatggaaactggcatttgtgttgtaacaggaactgggaatactgcagttctcgtcttatactaggctactagcactcctctgatctg

SEQ ID NO: 6722 - DNA, 2000 bp, Oryza sativa
gtgaaagttaaaacccaaagtgcaatggcattgatccacgtcattgtaaaagtatgagccatcggatgtaacaatcgatacaatacctactgttggatcgtagaaaagtctcagtaaaaaaatgatgaaatgtcaagattcttcgagagacttctatgagatggctgaaaaagagggcgagagaaacaagagatagcatcttcatctctaacaataaatacttcttaacctatcctcccagtaaataaaatatattggggaaagtattactccaatggccaattcagcacagtgaatctctgttttggtttggcgcaaaaaaagtatatgatgccacacaccttccaaatttaaatatcatacctttgaattacccaaaattgtactgaactacacttgaaattaaaaaaaatctaattctgcaaactttataatttaagtaacttaaacattttttttatcgtaagtgttagacacatcttccaaatttagcttgacatataaattaattctattagaatcatccactagaggatgatggactggagtccaacacactacaccttagcgccaccacgcacgttaaaaaggtcaaaaagccaacggtctaactctaaatttacgtcattccaaaaaaaacaaatgtatattaacactaattgcaaaatgatataacatatattaattttccgttttaactggatagtcaagataaacttattaacatacatttcacatgtagatgtatatggacgggctatatggccagaacgccaacagaatataagggggcgtgaagggagctatgcagtggtgagtacgatgggaaggtagcagcgacgatgagcgtgtgttaggaggggtacgagtatgagtaatgatgtgtgagttttgaaaaaaaaatagtgatatgtgtgtctgcgtttttcatttacgtaattgtaataaaaaaaatatgtgtgtattctcacatgttaatttcactctaccaatgactttttgactttcattaaccgtaattcgtcatttacattgtgatcacaaatttcagctaattactatcaacaacacgtaaacacatttaaaaagagatgttatagtcacgtggatgcacaatataatgtgctagtaattatgaaagtacttccctcaaggcacccaatgccactgtaaaaattagatgataagtgatcccagcaagcgttgtgagtggtacggtgaacataaattactggtcatatgcagggaagcataacgttgttgtagttagctagcttctcatgccatcatttttctcacttcaaaatatatttttttcatgaacaatttatcccaattatgatctgattataccattgttttcgttgcaactaaatcttgataacaagatctcagttggttatattcaagtgaaagaaaatatgtgtaccaaccattaaaatttaatatttcatacatgagaagtcaatgtttcaattcgaatttgaccatattgcatatttaaagtttttgtgttgcattggattttttctaaatgtcacatatagtgtcgttcgaatgttacaacaagtacttttgcaaattgttgttacaaaagtttgcttgttttcgtgatacttactacacttaaataagaacgcaacatccataaaaggtagtgttgtagatcaatgatgttgcatgcaactcacgcgacacatggtattgatggcataaggcatgccaagcatgacctatcatcgcccaagcactataaaccaaaaatttgcagtttcttttgttcaaatggacaatgccaactatgtgcttgctctagctttttcaagtacaagaaaatatgtggtcccacacttttctggcccatagattatgcaaagcatcttttggcgccagtggattttcttaataaaacaagtattgctcattgatttattgctataaatgcaccccatcctttcacttactaaccagataggcctaagaatcctcttgtgttcacc

SEQ ID NO: 6723 - DNA, 2000 bp, Oryza sativa
cattgtaaatttcgccttattttcagctcaaagaagtactaatactaagaaatacccacacgggctctcaggctctcgctacattgaagtaccaatttttgctgtacaacttcagtgctaactgggcttggttgtctgaaccaacactccacacaaaacaggcccaattcaaagacagttcgtgcattgttactcagtatactctagtacttatgttaaccggaatatacagtagtttagtggcttaatatcggcggtgattcagtttttagtggcataatagccggcggtgatgcaggccacagcacagcaaccctccctgtggagtgtggagtgtggactgtggactgccagccgcggcgggttgcccgcttgccgtttccgagctcccaacacagcgatactcatggagtatattttttcccttagataatagtagtagtacatgcttaattggttttttcccatggagtatttttacctccttttttttctctgatctttgtatatttgttcccttgataaaccaaaaccggcccaaccatacacggcaaacgtatcctcggctaccactatgcgaaatggtaaattgaaaccatgctattataattttgtaaagtttgacatataccatcagtatctcaatgacatgtagaacccacatgaattaataacatgtgggtcatgatggcatatctcaatttttacaaattataatggtatggttccaattttccctatgcgaaatggactgcatttttggatcaaagcttcaaatgagatttggctttgcatcctcttatccttagaccctatttagtttccaaacaaaacttttcaccttatcacattaaatgtttagatatacgcatattaaatattaaaaaactaattacacaaattatgtgtaaattgcgagacgaatcttttaaacctaattgctccatgatttgataatgttgtgctacagtaaacatttgctactgacgaattaattaggcttaataaatttgtctcgcagtttacatgcggaatatgtaatttgttttgttattagactatgtttaatacttcaaatgtgtgtccatatatccgatgtgacacgccaacacttttcgtatcgcaaactaaggccatgtttagatcccacctcaaaatttttcaccctgtcatatcgaacgtttgaacaccttcataaaatattaaatacatgctaaaaaaataactaattacgcagattgcgactaatttgcgagatgaatcttttaagcctaattgctccttgatttgacaatgtggtgctacaataaacatttgctaatgacggattaattagacttaattagacttaaagaattctgtaattagtttttttattagtatctgaacacctcatacgacatactatataatacccgatgtaacacgccaaactttataccactaaaaagaggatggacttggtgaactacgacctggtttagtcccaactttttttttcaaactttcaacttttctatcacatcaaaactttcatacacacgtaaacttcaacttttttcttcaaacttttaattttagtcaaactttcaattttggcgtggaactgaacacatcctacatgttttgatgctcgaaaatgttgtgaaaaactttcaatacgagtagtacagattgctcagacggggtcgtctcaccaccatgggcacgtgaacgagctcatcagctcaaccccttggaacacgcaaggctatggcaggaataccagtaataaactgttccatcccattcacccagaagaaagaaaaaatggcgcgaacgaatggggagaggaaaaaaaaaacggcagaagaaaaaactgttcgtgtctttaaaagcagcgctctagtggcaactataatggcagaggcggcagcgagctagccagcggagagctcctccaagtgcagagtaggggtcccttctccgccgctctgctcaccatttcctctctcgtagcc

SEQ ID NO: 6724 - DNA, 2000 bp, Oryza sativa
cgtagtgtttctcctgtatgtctttgcaccttttgcaagtggatatttagttataaatccaccttttttaatgcatgagtaccctcttaaaaaatggatgcatatgatttgctttttctagaaaactacatccaacgtgccaaccaataaagtcaaactggcagttcggttgctcatatgcagattggtaagtttctgtcttttctcgatccatttgcataaccttctctctttttaagttgcagagcatccaaattaactgtatcctctgtattttcagtactagtgcacacttataattgatcttgtttcagctttccttgtggccccttatagttctatccaagctcctttttgcgctgatttggcgcatggaccagctggagtggttgactgcagcaaggaaagaaaatctgaagtttggcaggttggaaataagtgctgctaatcaggggcaacctgacaagttacacaggtttggttgaatattaggccccgtttagttcgcgaaatgaaaatttttgggtgtcacatcggacgtttgaccggatgtcggaaggggttttcggacacgaatgaaaaaactaatttcataactcgcatggaaaccgcgagacgaatcttttgagcctaattaatccgtcattagcacatgtgggttactatagcatttatggctaatcatggactaattaggctcaagcaattagtttttgtttttatctatatttaatgcttcatgcatatgtttaaagatttgatgtgatgtttttgggaaaaactttttggaaactaaacagggccttactccattcatttttatgacaatcattttggtgtccttaatttccacgagcacgtcttgttkgtcctgttatgacattttctcctttcagaaatcagaactgaaattgggttaggcatgtctcctaattttaactgactggatactttgcggtacatcaacagcaacttcgttgaaaggattcagtaaaccttcaagtttcctctagtacaagttaattccacatcttccctatgaacaaaaacgtattaagtagagacctacaaaaagttggtttgctccattgtcttgatggaatagttaatgtaatgccggtgtcctttactgtgctagcgtactactaactactaatactagtacaactaaattagtttcatctaatctttaaacgttggtctggttgagtccttaattcaccatttcacctattaactccgtatcgacattatatgtgcatggacctcgaacttgaacaaattattctacgccgtatttaccaagaagaaaaccgtccaaccgctccatgttcgtttgtgtcctccgtttggtcagaccgtaggtttgtcgttcagatttggattagttcgagggtttcgtgcgctggcaggcggaccgggcaagtggcgcaacgtgttttaagggtggaactggaacgggtgtgaggcgaggcgagagtcgccggtccacggccacggcggcagggaagaccggaagaacgctgagccgtgacagcgacgggagggaagtgggaacgggtgtccatgagccggcagaagacaacggccccgcattccttgccgtgacgtgacatggccacggccaaagagtaacaggatgaagcgatggataatttagtgatcggtttccatggcagcgttgcacggttgtaccgtggcgttactccgcggggcccaccgatgagctgcctgtgcagtacaggatgggggtaagaagcggaggagatgcaggagtaggttggtcgttggtccgacttggcctggttttaatgcggaattctgcgccaaagaatccaaaacaaagacatcatcgcatcagccgcggcggcaaagcccaccaggccacccacccgtccaattccaagcgcgcgcccggcgcctcgtcgcgcatcgcttgctcagtagctcggctcggatgagacgcctcgcgcggacgcggtagccggtttccgtgggag

SEQ ID NO: 6725 - DNA, 2000 bp, Oryza sativa
gatccgatgattataataataggtccaccagttctagcgtaagtgtaaattagttaatatagattttaaattgttaatttaatgggtacacaatataatggtgacagtgcattacttgagaataatagaccagtgtaataaaaagtagatccgatgatttatataatggagccatcagtttaagtgcacgtataaattagttaatatagatattgtttattttataggacacgatgtaattgtgtaaaatttattttaaaatagtgcattatttgaaaataatagtacagagtaaaaagtacaccggcttaagttatatgatggtagattctttgttgtaaaattatcattattttaaaaatatatacattatatatataaatggaaaaaagaagaaaaaaggaaaaaaaggggggagggtacggtatatactccacctgccaatgcacgggaggagaggataggtgggacacatggtatttagtttgttttaagatcaattttatctaacggtgtataatattggacccaccaatttaagtgaaaatcaagggatatatgctatttttttcttagaatttataggattttctctattttattagagcgccacgtggcggtttgagagcgtttgtagaaagttttatggagttttagtatataatagatgatcgcggcgcttttaagttaactcgttcgctaccgcgattgcggcgtgattatcccctcgatcgaattgaacaatccaagtaaaaggtgatccaacacattggatcaccaccgcttttaacttacctgatcgactccaacacgtgaccggacaagagattgggaacaacgtacgaaccgcttttcttctcttcctcgccgatatcgagtaggagaaaattcacccggtacagagatcgacgataatgatccatcgagataagccctgcgcactaatcagatcgatccagttgatcattcatatcgaagtggttatcacctagccgtatctaattatctgtctctaatcttgttacccccaccactgtctcgttggtacgtgaacaagcagcgggccatcacacatcaagccgaaaagacccggcaccgcgcgctggctagctctacacactggtacgacgtagcgcaggcgcgcgcagcccggggcgcccgcgcgcaacgggacaaacgcggcgcgccacctcgacgagcctttcgggcgaagccccccgtacacttggcgccgcgaccgcgaccgcgaccgcgtgcgccgcgctctcctcggccattggcctacctgttccaattgcgcgcgtctccgtctctctccggcgcacccacctttccgccacccattggcgcatgcacgcacgccatcatccggttcttcgtacgaacgagtgaacgactactgcatgtacaccttagcagcagtggtaccaatttcctgcacgaggtggcgatcgatcgaaagaggccaaagagggagagaaataaacgaaaaagaaatccggaggtgttgtacagcagccaacgattagcagtaggccaacaaggaaccggtacgggagaaggagagaagaatatctcgcactcgtgctcgtcaccggcgccacgtgtcaagtggcgatcccgaggcggccggataaccatcgggggcaggggcacagcttttggcgcgggcggattcgtgacacttggcgggaaacaaaagcagctttgctcggtgtcacggtgcgtggggccccggcggttttctttacccgcaatcgcaaagaccacatgttcgcatctcccccggaccggacgtggacacgtcactcctcgcaccggtataaaaggggccgaccgggccgggagccgggagagggatgaatggtcgaacacagctagctagctgggctaggatcgccatggatcggggtgaccaccaccacctccagcagcagcaccagttcttgatgccaccgcctgcgccggtggtgccgccgcagctgtgcatgccggcgatg

SEQ ID NO: 6726 - DNA, 2000 bp, Oryza sativa
aaccaaactgcatgctttcttttacttgttgtaaataccaaaaccttctaatttcttagtaaaaggaactatctagattggtgaaaactgaaaagggtttgtattgtggaagcatttcttagtgtatatctggacctttccctatctttcttttatttttgggtgggaattttatcagcttcatatccttccaatcccatgcctccaatggaatgtatatctggacggcaatcattttattcttgtactcttccatggcctaaacaccttctcaattattgatggggctctttctgacattagttctctcctctggccctctaggctcccagcaaatcaaatatctgtagtactgaagaattttggcaaccaagtatatccatgcgtgcaatgcccccggtgataccgtactgattatttgtcggtcaactaacttgttgaagcgctagcagttaaggtgtccaagctgtactaacatgcttacttctcatatactatctagcagttaaggcttagctttcactgcactcgttttccacaaataatctccatcgttacattataaaactcaagcttatctgattaaaagatatgatcagcaaaccagttgagcctatgactaatggctttagggcctatatcacgttttgcgtgagagtgattgtgcgaaagctgtttctgacattgactaatcaaatcgtggaaggtacccatagatatgcgcctttcaactcttcgtccttgttagcttatcgacagtaaccaaaattttaatcttcacacttaattttagagttatttaatcgtaacacatttcgatatttttaagtattaacttttaaaccactaagaacatagatatagtgttttacctgtaatttatctaaaactgtttttcgttgctttgttcactgctttttgttgcctttgttgttaaatataataatttttaactataaatttagatatatatttgtttagattcgtaattaaaagttgttatattataggatggggatagatgttttattagcagtagctaaaacgatcgtgagttttgggtgtgcggcgacccatccgagcgtcggccacgacgatacgtagtgggccggatggatggatcgctcgctcgctacagtcgtgaattatcgacgcccacgcccaagcgcgagggaagatatgtgctcagagtcgctgagcacgcatctccaggcagccggccgttgcttcatcgacacgtatacttctgagctcatggtcacgtcatcggtactgcaggtgggccccaacgtgcacgtgacccccgtatcataatcacgtcctgccacccttttaactaatcactcccagccttttgctgatcggtgggcctagttgcccgagttctgacaaagtaatcagttggacatttggaactgattactcctactactctagtgaaaattagggaatttgacgggaacacccttcttggctctcctaaatgcacggccggcaggtgccatctgctggtccctggctgtcatgctcgttcgttcgttaatcttgtgaagcttttgatacataaacccctcacgaaatctccatattacaggcagcagcacgcagagccacgaaacgaatccagacaaagcccgcgttggggcatctgcaatctgagccctacggttacagaaaggacaaatcagggccgttcatacgtaagggcatatccgtaaataacgtcaaactcgagggcgatttattcgcgagcaaaaacgcccaactcgtggctctcgtcccattcccacgcttgcgcaagcggaagaaaagagtagaggagagagactgagggagggaggcaggaggaaggaggaggaggaggacgctgcagtggtgggtggcgtagctcccgatccgggaagccgacccggtctgggggatttgctcctggcgcgcgctcgatcgagagggaggccagggttgggttggggggagcgtgaagaagcgcgcgcgcggct

SEQ ID NO: 6727 - DNA, 2000 bp, Oryza sativa
gtctgtaagctgcgagatgaatctattaagtctaattaatccatcattagcaaatatttactatagcaccacattattaaatcatgatgtaattaggcttaaaagattcgtctcgcaatttatatacaaactgtataattggttttttttcatatttaatactatatgcatgtgttcaaatatttaataaaagttggaagtttgaagggataaaaacagcctcaggctgatgagaggacgcataaaggcaaaccggctagtgaggagcggacctctcggtctctcggaccgatcctgtgggcgcgaggccgcgagctatagttaacggtgtggattggagtctacgcgagtaacgcaactcgtcgagtcatcggtccgcggtggcgacccggctgaccagtcaacggtccactggtctccgggtggagctttcccgcttggtttccttcctgcagttgccccactagtgaatctttttctttcggttttctttacggaccagtctcgactctcgagatcgatcacacgcgcggtgcgcacgatcagctcatatggacgtccttttcgagcttaccaggccgcgcggaacgccgaaaccgttagtgctaatcaccgatgtggacactcccagtcgcttccgttcaactctctcaggaaggtggagtggatggccggacgttgtatgcacaaaatactctcaccccgtcccaaataaaagaacttttatacatgaacttgatatcttaggacatacggattagtgagtactcccttcgttctaaaaaaacttaatttttaggtttccgtgtctgatgtttgaccgtccgtcttatataaaatttttgcatgattagaattttcattattgttaaatgataaaacatgaataaaactttatacatggcttattttttaattttttttataattttttaaaataagacgaacgatcaaacgttagacacggaaattcaggaattaagttttttttttttggacgaatggagtagagaatagtgagtgccatttttattggtagagcagtattcgatcaccagtattgtttgcatgataaaatctgtatactctactataagctcctgtgtcggggcaaagctcggttacatatggcatctgtagtttataaacggatttgtggaacggtaaattaacgttctggatcttgactcttgaccagttcatccacacgtgtgtagtccgtttgttggttggttgctttcctgttccagctggaagtttttgacctacagtaacatcatttttcgctttctattttgattccccgttgccaagtcgacagccgacttgaacctgagcctttcggcgaaacttgaaacctccaatccccaatagcccacgtacggttgcagacagccttgtagagtcgccgtgtttcaccggagcgaactgtatactcctacagtttaagatagttcggtggaaaaacgagtcgttagttaacgacctgagtaagctccgacttaaaaaatggtgaaaaaatgctgttaatcatgcgtcgggaagacctaactcacatacccatatttacaaacgaaaaataatttatgaataaaacttttatatatatgttcttaacgatctaaaagtaaaggttgaaaaataaatatggataaaaaacaccaaaattaacttcaaatttaagaccgaaaatttaaattttgactgataagtataagtataagcgaaaagattaggctgccagttgggcctttcctgaattctggactctcgatgtcttctcgaataaccatgccgtctgaatcactcttaagtcttactaatccacagaaaacaatcatgtgctccggtaagcaacatgaagcttcgaagcaagcacgcaggagcttataacggtctcgttcccgccgcatttgcttaacattctcaaaccgaactccccccacttcttcccgcgtccacagcggcttgcggcgggggcagaacacaccatggaaacc

SEQ ID NO: 6728 - DNA, 2000 bp, Oryza sativa
ttttgccaatactttgatacgccatccgtgtattagttagtttttaagttcatttgattttggaaatgcatattcatgtttgagtcgggttctaagtttgtcctttttggaaatatgcaacgaggcgcgcaagatatctctttaaaaactcacatactaacttgagatgatcggattcctagttgcaactcatgattttctatatatatatatccaagcaaattcctatagtgaatttcaccttaactaaatcgtataacaataataaaattaaaataatcttcaccaattgcaacgtacgtgcattttttctaagtattatgtgacatatgtgtcttcatgtatatatgatatttgggttaagtgatgccacatgtaaaagtgacagatagttaaatatctcatacttgtagccaggtgtcgaaaacaagatttatttgtgctttttttttccctatacctctgttcaatactccatctttccatcttaagatcacattttccgaacttgtaaaccgtgcatattacctattatttttaaaaaagtttataggaatttgcttttaaaaattatattaatctacctttcaatatttttagctattaattaattaattatgtgttaatgagtcgctttatttgacatacatctagggggagaaatcccatattctctagactaacacagctttaattggaaaaaaaaacacatatactccatctttgaaagaatgtacttttgaacttaatttttgtctcgcaaataccatatttttaaaagctactagtgtacatatcggagcaagaagcttctctagcggaaagacaatataccctttcttgagagttcaatcatgttgcaagttccaagctcatggtcgggcgcgtgagaaagaaagtgaagacatgtggcttatacaggttagggccactgagaaacataataccctactccaatgttcttgcgctatacataatgattaaatttacattggaagaggatgtacccttcttcacacagtcaatggttacgaatggtcaaatgttacgcgaaaaagttaatggtgtgttatctagagcggttgttagcgcagtggtagtgtgttatcttttttttcaagggaaatagtgtgttatctcttaggaagcaaaaggtttgaatcctcctacctacgcatgcttcggaatcctgatcaaatctaatggtctaaaatttaacaaattttcttcagaatttctgtcgagatgtatctagcaaaatgataaattaaaaatttataatggacaccaaaataaaaatgttgaatagcatattactggaggtagcaaatgtcaaccctcaaaatgaggaaagagcaaaaagaggaaaaggagcgccatatccacatccattacggattgcagtagcagcaaggcaaatttgcgtttctttctgttttaagcaaaaagagatgggaggtgcgtgtgctccccatgtgcgcaaccgcaaaaccctaggcccccaaacccctcggcgagatcccatccgtccatcgcctcatccgacggcccagacctcgccggccgttgtacttaacgcagccgcaatccacttctctcgtctcttctcttgtcacaacacaatactgcagtgcactgtaaaagaaaggaaagggaaggaagaaaaagcttttgttcatctgctcctttccccccctcaaatccctcccaaatcccaactaatcgcccgatttatcagcccattcctcgcgcaaatccgctccgttagcttctcgccggctattcaaccttggggccatcttttttggggttaaatttggtccagagttgaggctttttctttcgggaggagggatttgggtagcaatggcttgtccaatcgtggagatgtctcgtttctagtcgccaaaaccatctagaatccactagtgttttgggaggtcgctgttgcgggagcagccgccgccttttgtgtgtgtggagtggagatggtgaccgag

SEQ ID NO: 6729 - DNA, 2000 bp, Oryza sativa
actgtgaatggttaagttgcagaatgcagagaagctcatcacatggcaggggatgtacaataaagcctgatttttatgactttgtaacactaaaattagttctaacacagaacatagtaggcattcagatgggaaaaaacaagcatattctatgttctcttgtgatgtaaggggcaatttttaacccacaagaatcaktagcagttcatgaatcaaacatccacaaggaaacaaatcacacaagcatattctgctggaacagagaacaagaataaaagattaccatgatccaggagaagattcatcaccaccggacgcatccaaccaagctgaagagctggggaatccacctctgtaggatccatcaaaaggtggagggaagggaaatccatccatggacgctgaataactggggaagccgcctggagggattgctgccactgctggcccgccaccacggccgagagagcggggcggcggtgctaacccgacaccgcggccgccacgactgaaggggagagccgccgtcgccgacccaacaccacaacctagggtacgggctggggctgccgccgccgcatctgaggcctcaggtgtgcctcccttcttcttcctacctgcagccgccgtggacatctcagcagcacccaaatcaagcgaggggagttggagattgggagagattgctgcgctatatgctggagcaaatttcctggatttcgcgggcaaatttcccggattgggggagtgggaggggagttggacgaacctggattttgcggggaaatttcccgcacgcgcgctctccgcgcgagatcctgccgcgccgtcgcctcgggacgacgagctcgtacaacggtgctgagcttgcctcttccgcctcggagcacgggtcgtcgccgtcgcctcgcgagaggacgcagctcccgtcgcttgactcaaccagggggttttttttgcataaaaggcatcacaaagacggggcaaaaagacccgctgtacgtgcccttatattttggaatggatggagtactactcatcccgttcctgctttatataataggaaaggaagtctaagggtaatcatgccatttttagaaagaggacattgtttctactcttatgtgaggtggatggcatataagggaacaggaattccgtttgatggcatataaggaaatagctgatttacgatgtcatataagaaactcaatgaacttttattgaaaaagaaataattttctcattttctttaacagaagatgacaatgcaaagagcttttcatgcataagacaccctagatctccatgccaaaggaaccttctatgttagttcttttatttattttagattttcaatgttgaatggtaaactttagcctttgggaattcaaagtttaaagtatttattgttatattaaatattcaatttttttttctgaaattcaactttcgagattccaagtacaaaattgttttgcaagttgaagctcttgaaaactaaaagacggcatgccctttcgtaacatggtatgtttttaagcatttgtgtttttctttgtgcaaaaaagtatgtgtcgtcaaagtttaaaaacaaacaatgcttcatgtcaattattcgaaaagattcgaaaagatatgaaataataaatatataataatacagagagatatataattagacgaaaaaaattcaaaataagtacatttctgggttgaaaatcgttcaaacaaaccactaccaaaacgaaagggtggaagtcggaatcggaataggccaccttgggctctctctctctctctctctctcgcctctctatctatctgggcccagaggttggattggaaactcccctcgcaataaaaggtgaggtaagctgaaaaaaattagggctacagaagaaaacccgaaaccctcgccttctccctccccggcgccgccgccgccgccgcactaatccgccggagaccgggagatcgggccagatccgccggtggag

SEQ ID NO: 6730 - DNA, 2000 bp, Oryza sativa
tcaacttatgcaaatagaaacaaaaataacaaatttaattataaatagaatatgcactcacatttaaatttgacatttttgtaattatatatgtcgaatttaaacttgtatgtttgtgaaatgatacatagcatgttgatcttgtttatattattctttaaactttttaatgagtttttaaacgacatgaaaaaaaaaacaagatatcccttgagaaacaaaaatccatataccttgtacttcatctgagggcagctttcctgcatttgtaccccatatccattctgtaccttcggaccaaagaaaaacgcctgcgcacggctgctgcaacaggctcactgcttcagtattctgcaaatccaccggacaccagcggtctattctgctgtgtgatctgttgtcgcaggaggatttgcatctcgccatctcggtcataccacctcgcgtgttgccggcaaagcaaccgttgtgtgtgcgtgcgtgcgtgtctgcgcgcgcgccgcgcaccggcgcatgtgctccatcgcttcggcatcacgcagccagccgggcaggtggtgccgcctcgccggtggcgaagttgggggtcagaattcagatccccgcgcccttgacagtttccataccgaggcgtggcctctgcgcgcgcgcgaatctgagctagatcaccgcgcccttgtcgattttccatatttggcgtggacgggcgcgtgcgagatcgcgagatgcgaaaccgacgaacgagtctcgtctcgcggcggcgacccggcgcgccgcacgcgggggcaatcgactaagagagagaccaagagagttaatgccccataaattaagtctttgatccgagaaactaatcccgtgtcaactcttcaggggatgcgattaccgtgcaacccacgtgcaacatcacggttcacccccaattcaacctcgaagcaaccgccttagctacctgcttacacacttcggccagaaaaatcgatcgctacagctgaatttacgagaaacctcttgttaagattgaagtcgaaatttaggggctctttgaatcatagtaatagaaaaatggaggaatatgataaacgaaaaattatgatagaaatgtaggtagaaatcagagaagtgcaaaacatatgaaaacacatatattaccgtttgattggattgcaggagaaacacacgaattgaatgagattgatagactaagagaaaaaattcaagaggtgaactctggctaaatttcttctaaaatctatataaaattatctattccacataaatttcaaaagatatgatatgatttaatcttttgttttaaatgcttttataaaatttttttggtatgattgaaatcatccaaaatttttatatttttctccaaataaaaaaggccctcagaaagttctaaacgttgggtacagaactatacagtgcccgagacttttcgtctagggtccagagattatgcacatgtttctcaggcacacctgcatgcatttgattggtaaaccgcttctactcacaagtcacgtaaagagcaggtacaaaagagcagactacaagctagctataagcatattttgagaagataaaagagaagagagaagagtagcgggctatatatttgtagccaactacaacacacagagttcaagatgcacgtgtgtatgataggtggggccaagtctgaattgtgcattgtatgtttataggtaattattgtatgaattggctactaaattagctatagatgatttggagccagtagtcggctatattagtattaaacttgctctaaacagtttctactcctgctacaccataaacaactcacaagtcgcatctgcacagaaatttactccaactaattgacttgctcattgcatcccagttaggtcttcatcacacatgacacaggattcccatgacacatgcatggtggtttcgagatttctcattgtctgttatctgaaacctgaaggctgaaactctccacggcc

SEQ ID NO: 6731 - DNA, 2000 bp, Oryza sativa
gtactttagccctattgcagtgagttgagcgttgattcttcatataagattttaatttggccgtgctgcgtaaaatttaattgtgagatttgtatatttccaagctagaaatgaaccatgaaggcaaccccatattgtacagtttcttgctcaattttacaagaagaaaataatgcagctttgtatctgaactcaattttgcgagaagagaactgtagctagtaattagggtagcaaattgactgttatgtcacttaatcacagcgacctctttcaaaaaaaaacttaatcacagcgataatccgtcaaacgtcatgtattaatgactggaaaggagtgtaccagaaactatatgcaatctgaaaccataagaagtagcagtactagcactagttaattagaagactaaactacagcaaaacagatgatctactagaggaacggatcagatgatgatatatacattcggtacatgaatgcattcacttcttcttccgatgcatgcacttctttcttactttgaaacttaaacacatgtactcaattattagcagagattatcagctactaacactgtgccattttacttttgagatttgagatgacatccagatttaacattacaactccatacaccgtacgagcccagaaaatgtcggaattcagatgcacgcaaccattcagccgtgtgactgttgctgttcttgtgatcgacatgtttaacaacatccaaaatccgttggttttgagaaccaattattcataagcgacatgctgtaattgtccatccgacgtcgtaataacgtctgtggatactccggctagcttcacaagatgttgaactagatgatctgagttaaaagtctcgtcccttataataaattagtattaagttcttctttagtattcgcgtcgtttttcatccgatgcctagctatcacatgcactgtagaaaacgcgattaggacgctctcctcctgtgattttgtttctactgtctgtgccattaatacggtctcaaccaaaggcaaagagatggcaacctctgttcctgtgtataacaagccgccatctctatagtattcaaacctttttgtttctttcctttctagaagatttctaaaggaaaaacattctttcagacttactatattatcgtcgcgaactatttactctaggattgaaaaatacaatttcccaaaatgttttctcctactacattacatatattctaagctattttttaggtagttttgatgctggctcggttcatattgtaagtcatttcatatttatcctatataaaaaaagttcttaaaatttgatcagtagcatttctaacccaaaatagatacactaaaaataataaatggtggaactaatctgatataagtagatggcatgttttttaagaaaaacttaattaaatcttaagaggtttgatttaagacaataatcatatggaacgaagagagtacataatagtatttgatttgtcgttgcaattaagttcgctacaataatttaataaaaaaatctgttttgaactggattacctaacagaggagatgcataatgcatttgccctgctctatccatatactatcagctaaagcacaaggacacccctttgttgacacgtcggtcaaagcagctagttaagcccaacacgccacagcccacctgtcagtgacttggatacgctatcatctcatctagtattaattttcatctatttaattttgtgcacaactttgcttttcagcaacgcaagctatagtttcaaaagcgcattgcatatgctcccaaattgagctgcagcaggaggaaaagcctctcgctttcagaccgtgatcacttaccatcctcacaaatatatatacaaaccaaactaaagcttcaaatccacaccaaacacaaacacaaaacctcacaaatttcgccaagtcgcggcacacgtcacggacacgtacacagaaggaaagaaaagggttgcagcg

SEQ ID NO: 6732 - DNA, 543 bp, Oryza sativa
caaccgaccttgtcaagtcagcacagtacgtagtactctctgkatctcaaaatatttaacgtcgttkatttttttaaaaatgtttaaccgttcgttttattaaaaaaaagtaattattaatttttttctatcatttaatttattattaaatatatttttatgtatacatatagttttacatattttataaaagtttttgaataagacgaactgttaaatatgtttaaaaaagtcaacggcgttagacgtttaggaggtagggtgtactccttttaataccacgcggctcttccgcggacaaactcgagcctctctctgtgtgtctttcccaccatctgtcgcgcctccaacgactctcgcagcacacaatccaaaaaaagatcaaaggaaacggcaggcaaaaggcaaagccacgctctcatttctccgtactccgtagtccgtccgtagtagcgactacttactccagcgagcaaccgcgccggtttctctagctgtttccttccgctcctccaccgccgccggcccgggaagggagggaag

SEQ ID NO: 6733 - DNA, 2000 bp, Oryza sativa
cgaggaggctcgcacgacgacatcgggcgtcactgagatgcgcgcagctatggagtcggcaagctcgtcggctggtgcggccttcccgcggcagatcgggcacgaggcgtgggacgagagccacatgtcgatgcactcctggtggagctgcctcaccatctccccctcgtcgacagcgctgaggcaaaccgcgcactcgaccgacgccgccgtgtccgagatctcgccgttgtcatgggctcgcacgtacgggaacgacgggaggcacgcgatggtggcggcgtctaggccgaacctcggcggcgtcggccgctgctgctcctgctccatgacaagtggacgatcacgccgacgacgggcaatgcggagagctcgagagcagatgaagatggtgatgaggaagaagctcagggcgaatgacacggccaaggcgccgaacaacatcgtggtgctgtagcatccggaggcgcccgccgccgagctcacctgctgtccgctccgcccgtagcccaccgccgcatcactgtcgcacttgtccactgctactctgccgccgcggcgctcgcccgccgccggcctgaagaagagaagagagaagagagaaaagagaagaaaaaaataggtgcagctgatatgtgggccccatatattttttttaattctttttgctaactagattccacgtcagcaaaaccacacatatatactgccataggaccttgagtgcacagtttgtgtgagtttaagggtacaaattttkggttttatggttaatggacctcaaaaaatctcgttgttaagttgagggacctccggtgaacttattccacatataaatacattccataacatgcatatgaccttccacaatacttcaaatctaggcatttctttcgattgaagaaattttaaaggattttccttaggaaataaactaatttatatcaaatttatgtaaaattcatgcggtttaaaggatttgaaaatggagctctcaactcaaataaacaaaccattttctaaagaaaaaaagaaaaaaaatgagcatatgaacaaactcatgcaaaattgatgctcttaacacaaattagacaatcgcaaaaaaagaaaaacacacaaattaggcgatctactccggtcatcaggtcaatgcccctgatgccaacgcaaagtccacgaaccagttaaaatccacaaatttcactgcctccatgtcagtagaaaaaaaggataaaagaaagcttcgagtcaactccctttatcctgctttgtttccttaagtttccgccatgcgagcctaaaaccatacgcatatgtatataaccttccaacctaaattcaaatctagatcttcggccgagtttagttccaaactttttcttcaaacttccagctttttcatcacatcaaaactttcttacacacacaaactttcaacttttccattacatcgtttcaatttcaaccaaacttctaattttagcgtgaactagacacacccttctttagattggagaaactttatgggactttcgaacaaattagactaatttatatgaaatttatgtaaaattcatgcattttaaaggaggaaaaaagtcagcataggracaaactcatgtaaaatcgatactcctaacacaaattagacaatctactccggtcaacgcatgtcagtagaaagaggattaaagcttggagtcaaccccctttacccgcccgtttcctcttgtttccgccatgccgtgggctcaaaccgccggcgccgccgcgcgccggcgaccaaaaccaccggaaaaagaaagtcagaaaaaaaaagtaaggctcaaatccaccgtcgccgcgcgccacmaccccgcgggcgcctcsgtctccggatttcacccggtataaatctatgaccgagccgacgcgagctttcttgcgtgttgtagctggagtgttcgaaggaattactggctggcacgcacgcgcgcacgggcatggtggcggtggtgatg

SEQ ID NO: 6734 - DNA, 2000 bp, Oryza sativa
gctattgataggctagttagttatatcttatctttgtgaatcataagtggctaagttaattggtgtaagtatttcacattgatatttatgagaacaaagcaaactcttgtaatccttggatttttttttgtgttctttggacaaagaatctcttttgtccaaataattagggctagtagtgttacatagttcattccacaagaaggtgaattgtactatttcctccgtcccaaattaaatcaatttctatgtttgaattttgtcccgaattaaaccaacttctaccttcttacttaccatccattggcaaatcaaaaaaaattatccatttaatacccctcaccaacctatccatcaatacaactttcctattaattagggccattttggtcttttgtcttttttcttagggcttattcggtttacaagatttccaaatcataggaatataaaaaaaacataggaatcgtataggaacgcgtgtgcaaaacaaatgataggaaaaatatagcattgatcctttggatgattggtaggaaaaatacaggaatgcttagtattaagttaacatgatcaaggttggaatactttaatctgtacaacttaaggctaaatacacagaacaatgaggggccctttgaatcgtaggaatgaaaaagatgttggaataagaaaaacaaaagattctgacaggaattaaagtgcaaaacagacgattacaaaacacatggaaaatacaagaatgaccgtttgattggatcgcaggaaaaacacaagaataagatagagagagactcaaaggaaattttccaagaggttgacgctctagcaaaattttctccaaaatctctataggattgtccattccataggatttttgaaggataggataggattcaatcccttgtttcaaaggtattcataggattttttttccaataggattgaaatcctcgaaaattcctatgattttcctccaaatcaaagaggccctaagtgatttgccttcatcctatgcgtaggaatagaaaaatgagctctaactggatgctaatttccatatggaatttcttaggaatcataaccaaaggaaattttcctatgcttttcctttgctcaaatactacaaaacgaatgggccttgtacgtttttcctttatttctccttcaaaacgaatgggcccttaaactttatcttgaagaagctacggtttgaaatttgaggaacagagaaagtagtaggttaagataggtcaacatcaaccttcaagtgtgatatcctaggttagttggaggatggtgattgctactttaccaatcacaaagagaaacaagaggcaacatctactgctcacaaccctacatatcactattgttaggcctggtttagatcccaaatttttttccaaaaacatcacacatcgaatctttggacatatgcatagaacattaaaatatagattaaaaagactaattacatagttaaggggaaattcgcgagacgaatcttttgagcctaattagtccatgattagccataagtgctacagtaactcacatatgctaatgatggattaattaggctcaaaagatttgtctcgcagtttccaggcgagttataaaattagttttttcattcatgtccaaaaaccccttccgacatctggtcaaatatccgatgtgatacmaaaaaattttcttttcgcagactaaaacagaccctgactgaactttcctagaagcatgaagaatcaacggtcaaccatccaggcatcagcactagaaaatcttttgttggccactacgcaaattaattaatgaatactaatccctaataattatactgttttttgcttcttcacttgttgaccaaatctggatatatatatatatatcgatcccccamctagtccgaaamctgcaacagcaacgggctgtccaattccacaatagaaggaaagcttcctggccagccaaccgccggcgagacgacggcgacg

SEQ ID NO: 6735 - DNA, 2000 bp, Oryza sativa
aggcagccgattaggttagacaatgatgttaacttagattatgtgatatatctaccactctacgaaacttccagcggcttgattgtctagatgttgtgtttcttttcatacttagtgctgcattagttaagtttgatctactaagtcgtgcttagaactacaatctctagcctgctttctggttgccggttagggtagtatcggagtttcagccgatcttatctaatttaactacttttattccatatgcttaatctatatgttaaatctgccctttatgttaagatcttatcgcatctaagtatattagacttatgtttggtatattctacttgctttaacatcttaatacagagtggtatcggagtattagccgatacatgccagatccatttgatcggctatgctataaatgtatataatcccactattaatatatatttcgatctaagtgatttatactgtctcgacaaggtgaccgatctatcccaatcacttgatttaagtatatatcgatataaggattatatatcattaatatctacagccgatcgagtagatttagtcctgatttgtttattgatatttgccgatcgatgtacgcatgacatcggcttgaaataaataatatgtcatcggcacctagccgatcggctatcatttataggattgattgcggtttctttgttctatttcttgttaattacaagatcaaatcaactggcacgctcatacatccgaaggtgagttttggacctgcactggagttaagcagatctcccaggcctcgtgttttctgtcaagaactagctctcaatgacttggctcctcgcagattcctgcttcttaggctatgttggttgtatgattcgatgatctatgccctcccccggggggtcccttttatatcacagatctggaggtctccaagtagaactcggagatatcagacccaatacgatacgccgacgacccagttctgtccgagaaggactcttcccatctgtagatttcgtgaaaggtttccttaggatatgtagaaaacatccgcgtgcgcgtgggtatgccatgtcgatatgtaacgtatatcgaagggtagagggtatgcctgacccgtaaccctgacacacataagatacatactattgtatttttcaacttgaaaggagacactagatggagtataaaccagctacgactagctgtgtagtcatgtccaatgaaaaatgcatgcattaaagttactttcttttgttctaagatacttctataatatatgtaaattaccttttggctttgctgaatttacttttatatgtctaagaagtaacttagtgaaatctaaaagtaatttagacatatcataaaagtaatttatgatttttcatcaaaatataatcatgtgagatcttgttataaagatttaattattacgaacacaacggtgtaatcggatcgtaaatcggatgagtagtttaagagaaaattttatttgaagtataggtgtatagagtctctcatagatggagtgttgtctggtttagacacaaaccagctaccactactgtgtagttatctcctaaacttatataagttttagcactttggtaaaattaggacggcagcaatccaaattcgccctaagaaacgaatcaagaaatagaggaacaagacccgattttcaagctataatctatcattgttcgtaacatgacaaggattttttatccgtcccccgccccctgcctgtgacgtcaccagtgacgcgaaacgccggccggcacgagcccggcacgtacgcctggtcctactattcctagtcctagcagcgtcgacgtcttcgtccgctacgtacctgactacccacctgcacgtcagtcgtcaggacgtcacgtcaccgacacgtggggcccaccccacccgcagctgataaaccggtacacacaccgtcccgtctgctttgcctcgcgcgcccgagctgagacacggcgagcaacacg

SEQ ID NO: 6736 - DNA, 2000 bp, Oryza sativa
aaagggtagaaccgtacttacactgccgtttctctctagtgtccagcaactaattactagttttttacggtgccctgcagcagaaacgcgttacggtgtctcttagctaattacacatttttttatatccggtagcaaattttaccaaaacaaaaggcatgatctttctttaaaaaaaaggaaaaaaaaagaacaagcaagaatcatacgatgcagccgctcccttgctagtacatgacgccaacaatccaacatatacatgcaaataaatctatccaaaaaccggcacgaaatcaaaagaaaaattatctgcttgagctcaccaaccatttttatatcggcaatggcggatgggggtaaccccaccggcgagccggagccacctcggcccccttcctcgtgtataaataagggccccggccatggcaatcctcgcaccaatccattccacctccgttaaccccgttcgttttatttgcgtttacttcgtttcttgggaaggcacttccttctcttcctaggaaggtaataaagrggagcctcctccttcctccatggatagatagatcaatgggagctctgcatttccttttctcgtctctgttctgttgttgggtgtgtgtgttcagtgttcttgctcacctagaactgtmsgtggtgctgctgcataccgaaatgccggtaatggcgatgataatatgagcgctcatgctcatccatgctgccggaaggaacacgatgacggaatttttcttggactcgcgagtgattcgatcatggggggaggtcatgccaaaatttttctccgggttcatcggattcagagggggaggtgctgcctctgaatgcaattgagtgcacctgaaacagaaaaaagaaaaagaaactctgcttcctttttttctctctcttcatgctcgttcttgcgttaggggataataataagccgagatctagtgaatatttggggggtttagcgaacatgatcatcgataacgacatggtgagatctagtggtgatgatcttgcttctggatctgggggtttagttcagcaagcctgaaattctcacctgggtttaaggtttcttttatttttcttttttcatcagattgaagtggatagaatgctagatctagtaatgtcctatgattgtttctctttcacctgaatttttaaaagcatttttgatgatttctctctctttctctctcggctgacaagttcattgtctttatccgttcctctgcatgtgcctctgtctcggagctcggcgacagacagtctgacagttttgggtcctgctgctaatggcaggggttaaatttatttaccttcatagtattaatcttccttgttactaccacttaaatcatattttaagataagatttaattaaattacgccgtgtcaacgttaatgacctcctcctttgccatggccaacaagaaaccccaatccatcccatgctggcctcgtgctccggaggagaggagaggagaggagaggagcttgaatgcgtcactcttcgttccagctttgctgctgctagcttagcttcgatctcaacggctatgggtgagctggtgcagcaagaagcgacgatctttttcgttgaaaccatcggattgttttggtggtttctctcctcagatctgcataaatacgcgcctaccccgcttcacccagttcctcggtcctcagcctggagcatcattgttcttcctccctccccttctccattgtttgattcctgtatgcttctcagtcaattatagctgctatgtagtcttttccttttcctttcttctagattgcttgtgaaaaagctgcgattttccttttcttccagtgtttgtcaaaggcctggtttttggttggggtttatggcttgacttttttttttcctggagtgattgtgttgactgggtctggatgtatctgatgatggtggttggttgtgcacgcaggcttgaggagccaagaggaagaggagagca

SEQ ID NO: 6737 - DNA, 2000 bp, Oryza sativa
gtctcaccgaacgttttgtcacaacgttatagaaatcgaccccagaacggctcagcaggaaagaggcacgtccaaatgcgcacgaccgagacagaaacaccatagttctgccaccgaacccaaacagtgcgtctgtgcgtgcagcgacaccagtgttgccaccgtatgcggaatcgcagttacctgtaccgtggaaatcccttcgtgtagcctggcataggtacgtaattccagtactaggctcccatcggttgcccatttggcctaaaatggcttatttggcttattagaaatttcaaattaatttataagtaaaacttttatagatttgttcgtagcgacttaaaagccaatattaacaaaaaaaatacgttaaaagcattttaaaatcaacttcaaaatcaagttcaaaaatttaaattttggcttattttttgcttgtctaggccaaacgatggggctactagtgtttccggcccgatctgctctgactttctggagcgagccatcgtgcttgtgatcacgtcgtctccggcgagtcacctcactcgtggttagtactgccactatctgaggtaaccaccagcacagtacatccactgatcgagagaacggaaagggcctattcattcatccccagcggtcggcgccgcggaagtccgtgccaaattctcccccacgctgatcgagatctgaacggtggtgacgactcacgcctcgtcagtcgtcagtgcccgcctcggcgcctcggctgcccgcagtttcggcgcgtgcgtacgccggcgcagacgccagatgcaattcacctctccgggtccgggcggcaacgcagcgtgcgcgggcgtgacgagcccgaggggggccggcggcggccgatctcgtctcggcatggtgccaaggsgccaaggaccctcgtctttccgsatagcttttctccaggttcamctccccttgctgcccccaccaacgtggccamgccagcgcccaaccaccggccccgcccgcccgccccgttcggccgcctgcccccacggccccacccacgcaagcgccctttccaagsgttaagccgtgcggcgaccgaccaccctcccactgattgcgaccgccccctyaccacgtgtccctcccamgtcgtccccamgcccgccctcacacaccccgcgccactgtagacactgtcgtgtggagcccattggctctgtccccaccggtcagtgaggggttggtggacgactatccagtcgtgactcgtaagggcccagggtaaataggtaggcctgatatttgtgggtcgcccatgagagagaccccatgtggggtgggccccaccaggcatcaataaataacctgtctgaaggcgggctggcgccacgtgttggcagcacggggttaggcgataacaccggcgtcgtgatcgccgttaacatcaaccgcctggtggaccctaccgcgggtgggccccggcgcacggataccttccacgtgttgcgggccgggccggggcgtggccacgcgtcgagatcaggtggagatggacggctcagattccccggaacgggagcacgtcacaacaactggacctgtcgggcgctgcccgtgacggcgacgggcacctgccctccttcccctcctcctcctctccttcccccctamcttctcttctactcccccccaccacccccgccttcgtgcttgcgtgtcgtcgcctcacctcgcgcctccgctactactgcttgtctgctgctgcagctgctgttattaccataccgcgggagaaggggggccgaacccgaaggcgtgcgagagggaggtgaggtgaggtggagccgtggaggcgcttgtttcgcgtgcgagacggtgcttcgtttcgcctcacgttttccgagggctacggcgacttggtgggagcgcggagaaaatctagcgagccgtcggagttgggtggcgcgcggccggctgtgcttctgaaggaggagtaattggagtagttgcttgcc

SEQ ID NO: 6738 - DNA, 2000 bp, Oryza sativa
ttgtccccgtgatcaccggcaacagatccgccctccccgcggttgccgggagaccgccgccgccaccctcgccaatgtcgccgccaccgccgccctagtcgatgctaccgccgtcgccgggaatgggtagaggaggagatgaagtgggaggagtgggaagagaagaatatatatgtaggaaaaagagaagtgggagaaaagaaaaaggagtggggagagatgcgcgctattttcacgtgcaggtcacttaataagcccgcatgtaaacatacgcttatttttgcatgcggatttattaagaggtccatctacgaaaatcaatttacgcgtgcagcccataaacctatcacagcgaaacgatttttgtagatgaaagcacttatgatccgtctctaatctaaggagggtctcgtaaaaaaatcaattttgtattagtgttagaggctgacaagtgggttcattgattttttttttgacattttgtattactagaaaaaatgcccgtgcgttgcaacgggtaaagatgttttttcactgatatattaagagctaagcaataaattaaaatattgggatcgctatatacattataattgaaaaagttgatgaaattttttcttaggtttagggtcaatagccttccttccattttagccttaggccagtgtcgaagatagtcccatggcagtacggttgctagtcccgtggccgtacggttgccggagcaaatctccccatcaaatctggtcgaatctttctcgatcacccaaaattggttgagggtttttaatccacatgatcttctcttcccgttttttccaaaatcagagtgtaaaactctttgtttccccatgaaatctggaaatccagcctaatctttctagattacccaaaattggttgaggttttttgatccacggtatcctcttttcattttttttctaaaatcagagtgtaaaactcgagataaaaacgatcggggaagatcaccgtcatcatcagcaattgttaaaggagattaaatccaacaaattaaaaccgaatcgaaaggaaaaataatggagaaaatgatgagggaggaatgaggaatcgcaattgttaargrrrwtaaatccaacaaattaaaaccaaattgaaagggaaaataatggagaaaatgatgagggaggaacgaggaatcgatttttgcaatcaaattggaggagaaaacggacaatcgatatggtggcggcacggcgccagggttcaactcgggagacggcgaatggatcggattaaaaaaccagatgagaaaaaccaaaatcgcatgggagaataaaccggcacaaaaaatttgacaaaaaaaaacaaaagcgcccgggagatgtgatcggattaaaaaaacggacaaaaaaccaagagcctaactgcgtgggaaaaaaaaactctttcgcatgaaaaagtcggaaaaagtacccgtggctgactttttacggaagtcggtctctagatgttttttttctatttttactgacgagcgacgacagaagctttttttaatcgcttttgagtcggacacattttttttctttttttacctctttgagtcggactgttttttctttttaacagacaacggaaattttagtacagaacataaaattaaaaaatcgacttaaacacggatgacgtactaaagtaccggcaaaaacattttcaatttttataatagtaaagatttttataatagtaaagattagtacaaggaaaaaggtcgcatctcactgacaggkkggcccttgtccatgttgatcgattcaacgggcctttagaacccggtcggcgcgtgtccatcttgatcgattcaacgggcctttagaacccatcgagkagcactcgtcagtgacacatccctaactattgtaattatagaaaatttaataagctgaagccacatgtcattctcaatataatagatgaagattagtttagattaatcaaaaccattcagttaactaaag

SEQ ID NO: 6739 - DNA, 1253 bp, Oryza sativa
gaataaaatttggtcaacaaatatatagcaaaattgttatgaaaatatatttaactatttatttaaggaaactaatttagtattataaatattagtatatatttatctataaacttagttaaatttaaagtagttatgactttgattaaagtcaaaacgacttataatctaaaacagatatataacagatatatggagtaggttattacactactagaaaagacatttttgtaggctgccaaaactcatttttgcaggtgagagagaggtccgcctgcaccacaacgactgcgaaaatcgatgattttcatagtcgtggcaacggcctacctgcgaaaatggaagggacgaaaaaaaaatcgcgccgggagccgctgccgccgcccggcctgcgccgtcgccgccggcctcccccctccctcctccggccagatctgggagcgaggggggagggggagctgccgcagccgctccacgccctccgccgccgccgccgggagcacacgccaccgcgccgccgggagcacacgccaccgcgccgcctcacctcctccttcaccgcacgccgccgccgccgggagcacacgccgccgggagccgccgccgcctccggccggcggccggggagatgggaggggaggggagaggaggagaggtgaggggaggggagaggaggaaaggtgaggggacttggaaaaaatttaggcccacaagtctatttatattaagtctattttcacaggcggaccacttaagcggcgcctgcgtccgcctgcgaaacattaaatttcaccccgatttatatttttatagacggttatttggctctaagagtcatgtctgcctgcgaaaataagactcctacgtttggaaaaaatggtttttcagtgttatattttaagcctcacgcccatatccttggccatcgcgcgcgtgttcgtcgtgctcgtcgcgcggagtagtgcacacgtccatccgtcggggtcgcggaatgggacgcgtccgccgtggagcggcactcgccgtacgtacgtcacgcaacccaacacattagctcagctagctgcctctccatcgcatttaaactcctcccctataggcagcgatcgatcggtcacccgcccccgcgcgcgcgcgctgacaaacgcacgcacgccgctggttgttggcaatcgagcgtgcgagcgagagagaaacggaggaggaggggacggccggagaagacgacgacgacgaggtggagagatcggatc

SEQ ID NO: 6740 - DNA, 762 bp, Oryza sativa
ccccccccccccccccccgatctacttcgtctgctcgccgcttctcgctcagatcttaatcagtcggggtaggtttcgcggattttggttaggtgggaagctaggctccagcatctcaggatttgggaatgatccccatcgtccctgcgcgattcactagtggaattggtggccctggtggcccgtagtgtgaatatccatgaactgattcggattcagggcaccgggttctcgtcatgtactagttactgttctctgctccgcgagagttctttgttttggctgtttcttcccaacaagcgcacaaaccggttatgttttcggtagttgttgaagctgagcaggaaattgcagctccactttcagctcacttgtaaccgaattgttgaatgctaacgttaccactcgatctatactttatgtggccattacttgttttggtggagtaacttatcttatcgctgttgcctaattacaagctgcacagctgtcatttcacttgtgactgataatttttctattgaaactagcgatttatctacattttgtcgcgttattggacttgatatttctttccttggtctttgggccacacaatttttgtccagtttattgtacttgctatctttgcattttgagggatgctactgatttatggttggtgaccgtcagggagttgatactgcaatgcgacattgaagatttgatccctttctgctgccttgttggtctcgttttgcatgctggtgtttggtggaatcc

SEQ ID NO: 6741 - DNA, 127 bp, Oryza sativa
  misc_feature (1)...(127): n = A,T,C or G
aaattakggatnacttggaatttycaggcacaaaaaaaaaaaaaaatcgacctcttctcgcaagcacttgcgccaatcacagctcacaagtcgcaagacaaaagccccaaatcatctcactgttgcc

SEQ ID NO: 6742 - DNA, 2000 bp, Oryza sativa
gtaaaatgctattagtaactacttagctaccagaaactaagaaagtctactaataacgcttaatacctgaatgtacgtgcggcacatatgagggtgtgaagcccacatgcattcggctagcctgcgtagcgccaaagtgcatgtgcgtgctttgcctgcttggctcatattaattattttctttttggcgcggggcagaagagtggactttaactttcttttttaataaaatctccaattaatatgtaattataatatacttttaatcaaaacatgcaaagctagcagtatttacatcactagaagtaaatctttcttgctcatgatgcttcagccggacggaaccctaaaatatagatggggcggatacactcgattaaaacagctaattgcaacacatatcatataaggttttggaattcataccaaatgctccgaaattcgtctatttcgatgaggcccaagacatgacctcctgtttcgcccatagtttatggtgtttggtaaaatttggttaaaatctgtctattttagtaggtcccgaaattcttatgcaattgaatcctagaaccctatcatatttatattgcaattgcacaaaaataatgtgcaatcaatatattccaattgcaatacatatcaagcatgaggtgtaatacatatccagccgctagcactgggtctgttgaggtgcttcttgcagcaacagctgcaatctgtttggctaggctgttggcgccagcgcactgctgtcgtgctgcaacaatggcacattcgtcgaggcacacaaccgcgcctatgcacagcgcaagctcgctgccttggaccgtggttccagtgttgcatcaaggcttagtggattgagcgagaagacgaactgacaatgccaaagatgcgatgctgcgagtgtggactgcggaagatgaatcgagatcaatcaattcgttatgcttgaaaggctggaataactgatcagttggctggatcgatggtatgtactagataatatgcggtctaggcctagaccaagaagcagaagaggagtcgggtcgggagtgtggggcgacgtaggctgtagctgggccggccgccccaggccgcctaatgagtgtgtccgcccctggcctgacacgatgggtaattaaatagttatgcatgtccctctttgtctaaacaatatgtataaaattgacgatatcttgggcaaaatcactgggcatggcacacaggagagctactttagcgacatgaatctaggcgaaaatctattgaaccaaaaatcgactgtaatctcatgaaaattttcgtcataattatagcaaaatcgttgttggattgattgcacgagaaaacagaagaagggagctaggtgatattatattgttttgttgcctacataaatcttaaagcaatcgaatggtctaaaatttacaagatttttaaagaggttttcgtaccgtatagaccccggccgggtcaaacttatttggtcgtcgctggttgtttgtagcacgccagctccatatatgtggattgcagctggtctatgataagttcggtcgatctgagatcaatctatcaatcgtcaaccctttgcctttgttagcgagctagcgtgtacacatttcaattatatatggtgcatgcatggcatccacgcctccacggtcaacgtggaaatatctctggaaacttactttttctaaataactgaacggattggaggcaggagacaaatttgaccaacacaatatatccacgacggctagacaatactagtagatgcatgcatggaaggatatagtagtacttgttaatcgtggaaactttggtaatgcgaatgcatttcaattcgttgctgaagatcgatgcaccatgcatatccatctctatataaagccatgcgatcccaccgattcttgcacacacactagctacttctacttctatcataccaaacaaactagcttaatttgcattgcatcacattgccggccgcc

SEQ ID NO: 6743 - DNA, 2000 bp, Oryza sativa
ggttgcatgttaaactttagagtagattataaagccatgtggtccccaccttttcttgcacgaaccgcagcaactcactagttaacttcatttgctttgcataattgaattgccacaagccaccatgcatgagagagcgcttactgtactagtaaataaattaatgtactataagccaatgttaaatctaacatatataatagtatatatgttagctataaggttagctttatttttttcatcctctctctttatctctctatgaatttaatgtatatttcttggagtttgtgtggagctagctcttgcatgaaagccaatactctccacttttgtttatctctctcttccacataagcatttagcttacttatagctcaccattatccttgctctaagagctgttttccaaactaattacccttcacacacgtaaaaaggaacaacggattagcaggggcgtacccaaaaaagttgcgatcaaccctactgtatatccgccgcgagcgccgaccgccgccacgccggtagccggctactctcccgccgctcaccgctgtccgtgtcgcgtgcccggccggcctgcgtctccgactccggatgggaaggatgtacatcgcgtacgtcgcgcgcagatgggcgctaggaggccgagatgaaggcgctctcggcgcttctagatgtcgactgccgccggcaacggcgaagaggtatttataactctttgatttttcacgctttattggagatgagcaggtgtcacgtttaggtgctgatcgcctgattcctgtgctgcatccaacttttgtgacattcttatcattcattgttaggcgcagtttagtttagctcgtatggttcaaccttttttaagcatataagcttccttcaagtcaaaattttgcttaatcactaattttatatgttttaagatgggttattaatatatgatggtgtatattctattatctattgtatataatagcattgttagatctacggtatttagaaaaaaaaatttaggttggaccacccatatattaaatcctagatacgcctctgcggattagcacataattaattaagtagctaaaaagttaaaaaaagattaatatgtatttttaaataactttttatataatattttgtaaaagacataccgtttagtattttgaaaaacgtgcatggtaaaaactagaagtaaaaattggaaactagcactaaaactagcactaaaacagcctaatagaatatgtgagacttccaattcaggccggctggcccaccaacttatgaagctagctgaaaattgagcatattttgtggtcatgtggaatttgtggattagttttcatctgctctggtaagttgagtacatcatatatagatatattcagaagtagcatcagcagcattcagcatttggcaactgtatttgttgcagcttgttgcgtgcaacaattgggctaattgattgcacacgagaagaagaagaagaagaagaaaaaggaaacaagagaattccaagagatatacacatcgtccggccgtatacatagctagctgtctgtgatgcatgcatggtcagctgtggcgaatgcgaccggccgctaagtttgatcaatcgtcaaagctcaccatgcatatgatgtagacttagtacgtacgttccatggaaatggaaagtctgagtgacttttctctcggtgtaactgaactcatgatcatcatatccgatctgatcggagtacatatttgaccaacaccatatacatccatgaataatttggatatacaatagtggagtattgaagtagttactgttaatcgtggcatagttggcaacgcaatttgttgttgaaaatatatcaaagatgccaaacactgcacacaccagctagcttccctccttatataaagccatgcgctcccaccgcttcttaacatcactgcaactcagcagcaagcaagctaactccattttgctttgcattgccacc

SEQ ID NO: 6744 - DNA, 2000 bp, Oryza sativa
ctcttgaaacacttattacgttttaccagttcaaagtattatgtcaaagtaaagccatccatatcaaagctaggaaccccacaagcgaatgcgaaacacccttcagttacttatctctacacagctgttaacagtattatggtttatgagctggcttgtttggtcatattcagaacagtgctaagccaaattcacttcatcagggaaaattctcttattaacaatacataatgttcctgaaaaatgaacagaaggtgtcaagttagaaatgtgtacagggctattaattggtgggaaattaataacttgtaaaaaaaaagaatttattggtgcatatataacaattagttaacatagagaaacgcctagggatatttgtggagctaaccggtctagattcgaagccttatattttttttatattagattctttcttaatattcgtttttttttacaatcagttatatgggtcaggaatggtttttctaataaattatactacctggggagtcatcatatataggtggtttctctccgcatccttttgaaagcgacgtccacccaattttgtacagaagcgatacatcgatcttcgcattatctcatcacaaagcttgactaatatattgtctaattacgataactctatacttaattagtgtgctaccactggmccaagtyttctcagcactttgcaggcttgcagccactcacttgtccctcgcattcactatcaagatgttttaggttttttttttgagcaattttacggttcttgagaaggtaccatgaggtaccattttttctattgtaaatttagtacctcttagtatctagatactatgaggtaccatgaggtaccaaattttacactaaatttttggtacctcatgatacctcctcaagaaccatagaattgctctttttttaatcctccagtgcctgcaattgcaacagtttttcaatctccaatgcgtgtccaggattaatcagtcaagcactagcaggaatgagctttaacgactgggtagtaatttaagcgtactttgccagatatttaacttgtcatgtaaagtagtagtattactaaattaaaaagtgtgcttatcattttttatattaggagcatatctaattgctctaattgaattcgatcagtgtgattgatgctatatatagagaagtactactacaacagtaattaaatatctgcatttacaatttgttacctagttttttttattgatttgcttttatctagtactagctttttaaatcgcgcttgagggaaattgttccactgtatatttttgggcaaagtccattgagcaaaatgtagtggaattttaaccagggaacacaagcacaagaaagacagaaaacctaaccctacaaatttccttttggtacgatttgcaacaggctttggacatcaacttgcattagacccagtccatcctctcttttcatcgttgttttagaaaaaaaggaaaacttgtcctcaggctctagcactagcatgcccaagtcgatgaggtatgtgccttaattaactaacattcagtcagttagtcaccggatagctactactactaacatgcaatgtagtagtattaaattaatttagttaatcaggtagtgggcggcgcagattaaagcaagaaattccgatgtttgatgagctacgcagctaggacaggatgagacagtgaatggcagagtccaagtcacacacactacactagaatcgatgtgtcgtcgtcgtacgtttgtccagtaaaagtcagctctcgcatgactacgacgatggaatggaatggtgaccacttgctttgctgctacagtacttcctactgttacatatgtcatcgtcatcttctccaacgccggcctatatataccaagcaatttaacctctccttcctcccccaactcatcggtcgattaatctcgcctacaaacccatttacatccaatacagctagcatcaatacagagct

SEQ ID NO: 6745 - DNA, 2000 bp, Oryza sativa
accttccatgttcttgttccgaatctgggttcccaagccgctgatgcgccccttccctgattcttctgatggaactaggggaggctgtgtggccatttttcccgttggagggtttcgtctagatctgtcgggtgtgggacatgcggattgcaggtgctgtcggttgtgttggcggcggcgggtcctgccgggatagttggccgccgacggccgcttggctgttgggttgcacggtgtgtgctggctggtagcgaggatggttttagggtgttgggcgaaagctctgtccgactcatagccggcctgacggcgatgaacgtccttggacatcatgcaatgcccctcctggaggcgtcgtcgcaagagcatctccagtagagaccctaaatacaattcctaaacagtttttaggtgctaaggacaaaaaataaactccagcaaaacccatactacaggtcctaaaataggaaggacctcaaatacccctccgcagtccctaggcctgggggctgtagaccgaggccctatcgccgtttttctacgcgggaggaaatttcctgacgtgtggtgtctgtcttccctcccgcggaatcgctgccacggcgccgatcttcgccagctcgctggttccgccgctcgtggccgacggtgcgaccatccagtacctccaccggccactgcttgtcgtccgcgtgcccgcttgcttgttttttcgtggtccttgatcagttcgcacactgatgcactatatggtagacaagaatgttctgaaattcatgaccatcagaaacatgttctaaacaatcctgctctcgattggtttatggctaactgtggttctaaacgatcatggcataaaaattattgttctgttcctttaaagtttgtggtgcttggtaggttgagacaattaggctgcttgcaattatgcagtagttccttcaaagattattctgcagtgttgttcttttgtgtcagttgtgagttgaagtttaacttcaaggttttttttttctaggaggatttaagctctttctgaagtttctcagatagattagattggaaaaggtatagagttaattttatctattgattatagttcttatttaattgaactacgtagtgtcttgaatacttgccggtaggatttcactcccatgtttgagaattttgaatttgaattatggtatttaaaattatggatttgaatacaattgaattctatacattagaaatattcgtatttgaattattactatgttaaactaggtgtaagcatagagtataatcagaaatacaagagaaaaagaaatgggggctaagaaatagggtctgctggtagagttggaggtaatttttgaattcttagaaaatagggacagccctcattcaacctttgaggactctaaaatagggactactgctggagatgctctaacaccctgttcccccttgctgctgggtgaaaaccctttccagtctcctgtttatgcgatggtggcgtcctttccgacgtcgtcaccttcttcaaggcatcgtttttggagaaaccctgcaaccagtccccctgctttcccatccttctcccctattccatcccctcctcctccccttttcttctgtcaagggctcctatgcttggaaactctcatgtatctcttctctgtaatatattcaggtggggaaatgttggatttttattgattggaatactgtattgggtcatctcggtgacaccaaagctgtactttggtggagtagcaatctttgcccttattgaccggataggattttggttaaatttatctacgtttttgtttgcggttcatcttttttcctaccagtcttatacaagatggtacagtttagcaactgattgttacattgcaatatataaatcgaagtgatagaagccacctcaagtaaatctaactattgttcataattcaaaggtcaagaccaatttctcagttcctgcgactgcgcgaaaaaacaaaacc

SEQ ID NO: 6746 - DNA, 2000 bp, Oryza sativa
ggaaaaccttcatagatgtcgattttcccaatcggcatcaagaagacggcactgatgacccaggtcaaaggtgccggttcaaggcgcacacgagccaaaaaaaacaatcggctcgacacgtcgagtcgatgcattgagccatcaagtcgatcccaaatgataccccaaatctcaaaatgatgcctctaattcatgaacacataaactataatcaataatccttaaaaaaaaacaacagatctagatcaaatctgagaaatcaaacatgaataaacatcaacaataaggaatcacaagagggaggggaagaggtggattcgctggcctccgatgccattgcacctctagcctacggccccaccgtcggatccgccgttgccgaggggcgtgggccactgctatgcctcctgatccggtgtgggccactgcttgccaccggttgcagtcgccgagagagcgagagtgagaagataaggtcatggagagagagggtgaggctaaaaatatctctccctcctctggcttctattaatataatttaccggtttaaaaagaaaacaaaatgctaacatgatgcctcaatttcttaattgttctttcttttatcatgcgttattatttaattcgtgctttgaaagggacttcaaagacgataaaaaccaaaactacatgtcacagcaccacactactcatgtgaaaggatttgcaggatccttgaatcaatgtaggcacatcgatggtatactatgatggcaacgccaaccactggaggtttattgggtaaaataaaattccattttactccccaaattattcagagcacttcacctcataaacaattattatattcgttttacaccttgaaccattaactcccaaatggtaattctcttgcttctatctatataagtagtattttgcactaaaatttggtgcgagtgatagataattactcacttaccatcaatattttctagaatttttttatcacttttttatataggttgagaaaactaagactaatttaaataacaagggttaatatttcaaacaaatagtcacggatatttttgaaaatatcttagaacttttaattatgatgtctctaaacaattttagctcaaaacgactcatataaaaagaaaccaagaagagaaatgctattaagcagtaaagtgggtagttttcaatagtttagaggataaaatgagaaaagaagtttataggatgttaattactctaatgaaatgaaatagttcgagtgagggaaatgaacctttttttttgcagaaataatttaattacgaagcaaactctccttgttaaaccctcgcatgatcctagccgccggkttctcatccaaggggtkacagaccaacccaattccatgggcsctcggggctccgcttctcgagcggtcggtgggtggggccccacgtttcctcggcgcctcgggcccaaccgccggccaccgaacgctgacgtktggggcccacgcggccaccacmaccaccggtcgctgacatgtggtgcccggggcgccgccgccgtcgtaccagtctctatcgccgtctcctctcctcggcgagcggagcgtgttggaacgcgtgcgtgcgtgcgcgtttccacccgatttaaagagacgagagaaaaaaaagaaaagaaaagaaagaaataaacggaaataaaaccgcggcctttttggttgggaaggaaagggaggggttggtgctctcctcctcttcctcttcttctccttccttcctgccattcctgtgaccccgagccgaggcggcgagagagagagagagagagtattagtagtagtaggagagggaagcgagtctcctcttcctcctcctcctcatcgccgttagctgctgctttcgccgaaggattgttgctgggccgcgtcgtgaccatgggtatgtttcttgttctttcgttggctctaggatttggattttgagttcttgttccccccgctctggtagcccgcc

SEQ ID NO: 6747 - DNA, 2000 bp, Oryza sativa
gttcaactctaaatgcaattattctctactttcataaactcaggtatatgatagttaaaagtaaaaacttttagagatatatgtgagaatctataaaccaaacttattataggaaggaggaggcaacaacactggttcacatactcctactctctccgccaaaaaaaagaaatctaggtccggatatgatatattctagtactataaatctggacatatgtatgtccagatttctaatactggaatgtgtcatatttggtactagattggtttttattggacggagaaagtatgtggtttcacctttttttaagggtctgtttggcacagctccagttccagttcaatctctcctagagctagagctcagacaaatagtttcagctccacctaaaataggagcggagttaggtagagtgctatcacaatatgaactacagatgtggagctgaattttagctactccacagctccactctaacccaacttctagagctaaattttaaagttagagctctactaaactgggactaagccacgttaaaatctctctaccatgtgtcgtgcaaacacagctaattgttccctcaaatccacacgaaagccactttctcagcacccgacatgtgaggcgtcgtccctcgttgtgggtctgggagctactactcctacaccagtaggggtattaccgcagaatctagggaccaaaccgcaattccgcgaggatttttactgtgcacctgcagctccgcagtcgcgcgctccaccattccccaggaaagctgcgctccgtatcgcttggcttttaccggcacttcccccttttgatgccccgaccaaccgaagcaggcagcagaagcagagcagctgctgccgctgccgctaccatccgcgcgctcttctccacgcctctcgccgggccgcgggccgaaccgttccaccgccgatccgtcgccgaatccgcgcatctctcaccgccaccgcctcgccgtcgcttgcctacgcgcggattagcattcggttggaggagtagttcgtcttggttgccgcctcctagtctcctaccgattcggtgtgagacggtgtgtgcgtgcaagcatgggcgtgaccgaaccttgaccaccgcctcgttccagtcctcgtagggctatataaactttcgaaaatgctatacacacgacggatttgtacgaccatcatacgactagtcgacggcgttatctgtgagcgtgagctgtgattgttgggccttttaaaagcccaactccagccgaagctccatattccgacgtcgattcctcttctcgatattactctatacacatccatgacttttcatcttctacatttcctttctcaccctaaacccttcattctaatccccttcgtctcctatccataccaatcagttaagattaatcagaatttttttttgcggcaaccgcaacagagtattcaggttgaagctaacagaaggtattttaggctctgattttctaggccccatgaacaattctattaatcttttatctcaattcgtttttcaacatctcttgtttttccatgcttgcaaacatatacatggccatatttgatttttcaactgattttggtcataaatatggaaattgaagccatggtgccttgtttttctatcaagtctggtcaatcattttttcttgcatgttatggtttttttaagaggacttgcatgttatggctgtgaaaatatattggtttcatatcctgaaggcctaaactaatctaacatctggagtgaatccttttaatagcaacctaagctatatcgatacatgtctcagccggactagcctctggcctcagtgtatagaaagcacagtacgcaagcaaacaacaacgaggctcagcgacgcgtagtcatatctgacgctgtcattgctcgttttttctgccgtttcagtcgtacatgcgtcggacacatgagttggacgtatagcaaagttgataaactttaggcc

SEQ ID NO: 6748 - DNA, 2000 bp, Oryza sativa
ttggccacggccgccgccgcacgtcgccgccgcacgtcgctgccccgaccggagagggagaggaggagggagaccggatctgcacccggtcacctatggggaggccgcttgccacctcccttggccaccgccgccgccggacatcgctgccaccaacctaccaccccgacctccccctctccagatctggccgccttcgatgaagccgatggagagggagaggcagaggggaccggatgtgctcctcctcgtcgcgcgccggtccatgcgtccctgcttgccggctaggagatggggacggagggggagggaagcggccggccggaaaaaaaaagggcggatggagagggggactcggcgggtgctggagggggagggagaggggagggcggcggaggagaaggcgtgggtgggagggggaggaggaggaggggagggcggtgccgcggtggagaggagtcgagacttctctctcgcgcgtggataaggccggaggagaagatgcgcggataaggaagagaagcagggacctacgcgcagattagtccggatattaggccggctcggctcgcccagttcggctcggtttggtatgggtgccggttttttaattaaccggcacctattatatattataggtgtcggttctttttaaaaaccggtacatatagtattggtgccggtttttctaatgaaccggcacctataatccttaaaggtgtcggttgtatatttttcaatgtgcggatgtgggaaaagtttcataggtgccggttataaatgaaccggcacctataaggccagtccctataagggtttttgtagtagtgatgtaaatagcaaggggacatcctcttaagggatcaaaatagtttccccttaaaaaatatatgtatggtgataggagatacgtgtatccaacttttcttttcacgccacttggttacggccttcacggagccatacatctatcgtctatgcatccatctactctttttgtaccactctgtttttggttaatgtcatataatacgtgcaagcaaacagtatcttgaatcactacgggatgaaagtggttagaatttagagaagaaccgctaatatgatggtcaaataatagaattagatgcaccggtcatatgatggtgaaattattggtgcatcgttctatccactatagggtgccsacgaatatcgscccatgtggatgtactctcaacaggattttagggagacatggatgtgccaatagcctttctctataagcacgtaattaagtattagctcttttctaaaaaaatattacctccgttttttaatagatgacgccgttgactttttcttacatgtttgaccattcgtcttattcaaaaattttatgcaaatgtataatatataaatcacacttaaagtactataagtgataaaacaactcataaaaaaacmaattataattacgtaaattttttgaataagacgaatggtcaaacatatgagaaaaagtcaacggcgttatctattaaaaaacagagggagtagattaatatattttttwaaagtaaatttcgtatataatttttttttaaaaaaatacatcgtttagccgtttgaaaaatgtgcgcgcggaaaaaaaagagaggtgagttggaaaaggagggagaagaacgcaaccatagtaatggcatttatctaaaatgacatatttgtaatggtatgaatccaattaacctaaaaaatattagtatttgatatatgcaaatttagtactagccccacacatatttagctcaagagagatattttgctatattggttaacatcagtgattcctgtgtcaattagcactagccacacacatatttagctcaagctccgtcactgtaaaagtatcctgtatccaatgatcactgaccacctaccgctccaatataaagggacccatatgaatatgatctggcttttgtcagtacagctgcacgctcacttgcaaactagcacca

SEQ ID NO: 6749 - DNA, 2000 bp, Oryza sativa
ggggacggggcgcatactgggcggcggggggctgagctgcgagcggcgagcggcgagcggcgtcgcctctccgtctctcggtcggccgagaggatgaaggggatcgatctgctttcctgggaggaggaggctatctctttactctcctgacaggtgggcccatgggtaaatccgtccgatcaggtgagaaagatgaaggaaatattagaaatctgagaaatttaggaaaatagagaaaaatggcatggaatgaaggaattcgtgcttccaatggcatattctgaaagtcacgcgaattgagtggcgtatcctgaaaacggtgtgaattggatggcatatactgaaaaatctcgccttgatccgattctctttcatttttcgcacgtttgccatagagagtttgatgaattatatgaggcccgagagagcatgcacgatcgagacagaaaataataagtggatgaactcagttgggtactatgcacgattgatatatggcctagctaaggatgctttaaaaaaattgaaaatatattatttttaccgatacagtagaaatatactcgttttagaataattggcatcattataccgttgttgcgtctataggaaagcgaaatcgctgacatgctggtggatgcgcgcgagttcctaccaccaacgtgcaaactcgtgatgtcatcggcgcaaaatcatgcaagtacataaatgcaccacgcgaactgacgacatcgtgcgagttcatgagttcagcgtgcaaactcgtgacatcatccttcgtgaacttgggattgggatttggtgatattcccccgtaacattctcggtgacattgagtcactgacatgtgggtccagacacatatgggtccacatgtcagtgamtcaatgtcaccaaaaatgtcacggggaaatgtcactgaatctgcgtccgtgaacacgtgtgagttcatgtgtgcagcgtgcgtacaccgagttgacagtggtggggggattgtcgagcgcacacacctagtcacatgtatcgggagcacgagagggcgggagcggcgtcgcgcgtggcagacgcgacgacataagtaacgctctcgcgtcctcttcatgcaaacttgagacggaatcgcgacctcctaatcacgacaaaggtgatctaatcctgtaattcttttggctgtagttataccaacgcaaaaaaaagctgtaaacaatatattattttcttattaaggatgtgttcatttggaattgttaatccttctcccagcatgtaaaatggaacaatagatcaatatatgattaattaaatattagctaaaataactttaaaaaataatcaatataattttttaagcaattttactgtatatttttttaaaaagaaaatactccatttaacaatttggaaaacatacgtgtgaaaaaaagaaagtagaagtttggaaagtgtattatagaacacaatcttaagacttggtaagacttaagactttagcactaactcatgattgtcttgatatcttctgcatgctttctaactattccctccatctcataatataaggcatgatcaaatttggcacagtcttcaaaatacttaattaggctgtgtttagttcctgaaaagagttggaagtttggggaaagttggaagtttggaaaaaaaaagttggaagtttacatgtgtagaaaagttttggatgtgatgtgatgtgatggaaagttacaagtttagagtagttggggatgaactaaacacggtcttaatcatgcaataatatgagcttcgttttgcgtgtcggggaggaacccctcctcccgaatacaacctagctaagtgagcctaaatattgtttagggtgtaaagcataccaacacaatagttcggggttgcaaattagacttttttttcttaattttaaacagatttcgctgctttaattattttagcggatgatctggtggcacgctttcatcgacgctagttaatcgatctgtacttcc

SEQ ID NO: 6750 - DNA, 2000 bp, Oryza sativa
attatacttttataaggatatacaaatagggacaagcgtgattttatccatatactgatgtattatgggttgacacctttcaacatcaatatcctacttttttcagttgctacaaatgctctaataagtttatttacaaataatatgtgaagcatcgtacagttctgtttggtgcaaaatacctgtaattattgttggcacatcgcatcaaagaattggtcacttctaaaatactactccatcaaatcaaaccataatgcagtgttttttcaacgaccacttagccatcaaatcaaaccagtaaattcttgttgatgtagtactaaacggtagctccatagtgcagtgttttctacttgatgcacaacaactattctagcctttttaacttttaatgtgagtattagtgcatcgtctaaaagccttaggtatatgaatcatgacccttataaaaaccagaacataacctataaatctacacattttccaggtacacatatatttaaaaaacataaaaaaaaatagaaagaagtatgcatagctcaattggttttgtctcttgtggtgaaaccagcctgtctgagtttaaaccctaaacttgtggtgaaaccagcctgtctgagtttaaaccctaaacttaagtacttaacatgagtttcgtatttatggctaattattcatttagttgtaagcgatatacctatcaatagcgagacatttgtggccggtccaattttccggatgtgctcatagggataggatgtgtgtagagatggcaatggggacccataacccgagacccgacgggtttttactctattaggagctaatcgtgttcttactgttatacccatgggtctactaacgggcgaaaactcttacccattgggtacgtgggtatgggtctgttctttacccacccgtacccaccaacccgtgggtaaaaaaaacccgttgattgaacctaaaactatgagcaatataagtttcaacgactactaaatcatagcataaaacttctttcacatcttaagcattgttctatactagttatgtgaaattattattagatttattgattatgtattgtggttgtataatttttttactcgcctttgaacactaatattaatagcattgttgctagagaaaatattgatagtttagaactctaatatggctaattagagtacaaaactataaatgctacaagtcaattatatgggtatgggtacccgttagatacccgttacccgcatgggtatgggtatggggacgattttgtacccgcgacgggtgtgggtatttaagtaggaatattttaacatcatgggtgtagggctgtgaacgagccaagctcgagcgagtttgactatgtaggcttgagcttgacatgaactcgagccgagctcaagccgagcctgccagcctggatactgatcgagcttgggaatgagctcgagtttaagctcgagcgagcttcgagcctactcgagcttggtagcttaacttggtgaaactccaaagaacttactcttatataagagatattaatgtaaattatcggtagtcaaaattaatgggtgctatttgtcttgaatgaagcctctgcagcttttctcatgaatacatggctttgaaacgttgcaattaacaaaagctagctactacatctaataggaatagtagtactattactagcagccgaataattactttattgataagcattgatggggtcttgagacttgagcaggtcaagcacaatgacaagtatatattggcccatcaaaaatatcttcctacatgcaatgcatattatactaatcaagccttgtcgagctattcgagctcgagcttgctaggcttgcgagcctcagcctacgcttgagcttggcttgtctagtattcgagccgagctcgaatcaagcctgtaacgaatcaaactcgagcagcttgcgagctccaaacttttttgacagccctacgtgggtktgggt

SEQ ID NO: 6751 - DNA, 2000 bp, Oryza sativa
tatcaacagtcattgtttttttttgtaatacttgttagtgctggccatgtctctctatcacaccttatttttctttgagagaattctctatcacaattattaatgctgtcgataaattgtctggtaatgctaattcactttttaccaaaaaagtaaactacattactgaatctcctcctttgcctctccctttcaccacacatataaaagctgaattcaaagtatttaatctgttttctctgctgctttcaaagcaatgtattagtggaacattttcttgtgctctttctctgcttaatccatttctttccctacgcattgtatcaaaggtcaacaaatttcaaactttcaactaggcaaacagttatttttgagtcaagtgggtaaaatactaaagcatatcattaccataggggataaaaaaggggaatgaattattacggcgatgaatattccgtacagtttcataagacaacaaaacagtacgataactggaaatgttttgggaaacaagacaatgagaaacggtccagagattcttctgttcgcactgtttatctgaatccatgcttgcgtttcatatgcatgcagtacatttctgtcttttaatggtttacccagaaccaagaactcatgataaggcctggtttagttccaaattttttttttcagaattccaactttttcatcacattaaaacttttcctacacacatcaattttaatcaaactttcaattttggcgtgaactactaccagcccacaaaactaacagctaacaattctttgtaatttcaggttcgcaggtactaccagccgaggaagagccaccggttggtgacggcggtggtccacggcaacaaggtgcccctctacggcgccggcggcgggctgatgctgtcgagctccggcggcgcggtgccattgacgctggacttcgacctcacctcccggggatacgtcatcggcaagctggtgagggtgacgcacaaggtgcacgtgacgtgccccatcgtcgtcgacgccaagaagacgaagcccatcaagttctccaagaaggcctgcgccgtctacaagatctgagaggccatcgtcgccgccgccgtcgccggtcgtcgtccatcacgccggcggcgggcgtcgcctgcagtgatcgatcggcgacggagccgttcttctgttcttgcagttgttgtatgtattatgcttgtgaagaacaataagcgtttatatggtcacttgttaattttacttgagcttcgattttgttgataaatcagtaaatcactttgtatggtagtagtgttttattttctctgctttctttctttcctgaggaaactatgtaccgaagtgtggtactagagtcagtctagatggttttacgttaaagatcaccatgtttacagtttcgcatggacaatcactgcattttgttttgaacagagcatattaaacagcaagcaaaaatcgtgtttcttttcacctcaagaaatggtacaaacctgtctttcaaggattaataatcttctatggcactgaaattttgcaaattatttcatgtcaaaaatataatgtgatattagtaaggttttgtgtaatttggatgatccttggatccagcgcccgttgactccccgtatagacaagagaagtgctgagctgacctccgagctcaaatcacatgcaaattcggctcccaaactttgcttaacccttaatcacgcggtcacgatccaaaccccatgtgcgtgcgaagcggccgacacgtctatccctcatgtcactgacatgtggcccccaccactcgcgtggccccacacgtcagtctccgctctccccccgtgatcgccgcggcgctctcagtctcatctccttcgccgtttgaacaatcgagagctcgccatttcttcgatctcctctcctcttctcctccacctcctcctcgtggcttcgcatcgcgtggagctcgtagtgtgctagatctaggaggaggcggcg

SEQ ID NO: 6752 - DNA, 2000 bp, Oryza sativa
gtggtggagagaagaggggaaacacacgcgcgctcgctcgcctcgcctagcagggcaggcggcgcgcgtgcacgacgtacgcgtcgaatggtccgaaaaattggctcctcacccttgcgcagatgcagcctccttttgcagttttgttttgctgcaaattcggattcgtttttgttttggaaacgttccgaaaaatccggtgcgtgcaaacggcgtggagtccggataagttacgcgcgacttatccggttcggttacgcgcagtagagatcgtgcgggcgccctgatcaagcgacccttctctatataaaccgacctgccgtcttcacgcaacactagcgaaatcaatctagggtttgcctcctactctgtactgcgccgtcgctcgtagactactccatcccgctcgccggcgtgcaccggcgatcgggagagcaggtctccggaacctctgccttcgacgtcctgcaccgggagaaggcggcaataaggtttttgggaagcgcttcgcgcgactgctccctgtttgttcgcgacggctcgccttcctcttcgctcgcgtgtttcgtgccttcgtagacacctgcgaaaagtttcaaccaagcaaccggtctttacgtcacctcggtacgttttcaatatgttgcgcatatttgatctgttcatgttatactgtgtagtttacatgtatagatctaatgatgcgttcatgctagttttcatctgtaatgtcatgatttatttatggaatatattaaatcattatatgtctataatctcaacatttccttccccttctcccctcttcctccccagatgcggtcggcggcggatgtcaatctcgagcatcgtcaccgtcaccctccagcacaacccctccctctcccttggccgcgcacggccgacagtggcttttgtaggcgacaggcgaggaggaggtagctaaggaggaggccaagcggagctcgcaaaggagaaggaaggcgtgtcagaggccgaatcagaacttcagtggtccagcctcttcgcgcgttgcactgcccgccactactgagccacgggcgacacgcttgcctgtctgcttctagcccgtgcacgaggagccccagcgtacagcgagctccgagcgagaagagggaggagagggtaggagcggtgcgtgtccttgttgtcgtcgttgttgccgccgcggctgcatggcgtggaggtggaggcgaaaggggaagagggcgatgcgtcagagttgcccttcgtgggatagttgtccgagctaccaaggaccttcgaggcgatgaccatggtcgccgctctccaacgctctcactgttgtgctcaagcgggcgcatacacgtaccaccgccgcaccggcagcggctgcgtcgaggcgaagcgtcggcttcgagacgaagagggagaaaagagaagagggatgtgtcgcttacatgtgaggccagagcggctcggcctcatagccgcgcggtcgctggcaatggcatcatcatcaacaatggctccagcctgccccctttgtcatcctccttagtcctcatcgacatggacgccctccccgtctaggtgaagagaacgagagatagatgaagagagagagagaggagtgaagaggccctgatacgtggggttcacgctagctcaacactgttgactcgggtcaaattgccacatcggacaaaaccactctgtatactgttatgggacctatattgcactggttttgagaaacccgttggtatctggtattacggttcaaggacgaaaatcgaacttgctatcaaattaagggaccaaaaattaacttattcctagatcatgatcaatcatcaggacatgcatgttgggctaaacttgagccaactttcggccatgtctcgtgtttcttgcagtttttcttcttctcgatgagatgatgaaacaatgttcaaagtcaagacgcaagatccgtttatctcgttgcatcgtcgccatctgatataaacgatgaa

SEQ ID NO: 6753 - DNA, 2000 bp, Oryza sativa
tatatctcctctctaagctttcaagcggtgtaggtgagtgggccccactcccccgcgttccacgtcagcagcactcgcgaaagtcgttgctgcggtcaatcacgcgcgagctaatctaatcatgtactagttcacaatttcgcacctaaagctagctgacagagtgacagtggagtgcattttatagaaaacgttaaggttaaatttagttgatcgatttggaaaagaaattttaaaataagttcaaggagccgtaaaatttttgtgagagaaatactttaaaaagaactgtgaggaaaatacctgacaaatttttagagctataggtgtgagattttcaaaaatggcgatttgattaatttgatcaacagaaattgtttgcaaaaaaatatgattgtcaactagtcatacttttgacacgatgcatctgatgatgctgatgcctacggtgataaatagccacatctcacgtcaaaaaaaattaataaatagccacatcaaactctttgacctgccattatttctttttgggagaaaccaccaatttttctagcatggcttctcgcatttgaattcaacctgctaggctgctacatcataggtcaattactcgttctttaatatgtcgacagtacagcatctacatatttgatcattttgtttttaatcatgtgttcagaaaagtatttaaaatattaatgtgtatatttttttacaaatatctactagaaaatcttataatatgaaacggaggaagtaactactaattctattttcatatattgaactataatttttgtttggtttcaaaatttaactgcatgttttgtacgcgtctattaatgaacgagaaaagtaacttgccaaaaaaaaatgagttaacattaaaaatcgacctagcttaaagttaagactcgagccagcctccatcaatttgtgaagagctcggcctaaaatggaaagaagtgttgtggcccatgggcttttgaccctaagccttaggcactccatgacccagtctctgtataaagatgtctaaagatcagttcaaacctcaaggttgggatgttattccctctacaccgaaaaggcgaaaatgagtaattaacatgtttggtagaggtccaaaacttctaaatttagcttcaggagttagatctatagtggagttatgtagctgcctaaacccagctccacatctctaattcattttgtaagagagctccatccaactctgctcctatttttagtggagctgaaactgtttggatgagctccaggctgtgccaaacaggctctaattaagtattagcttaaagacttgaaaatatatatttagaacaactttcctttataattcttttaaaaataatatcgtttagcagttttggaagtaagcgcgtgaaaaatgagagagtagttgttatagtaaaatagtgaagacaaaataaaaaataagacaaagttccttgtgcgcctcctagagtttctctttacctccttaatcatatccttacatgtccttaaatttttattttgatctattttatatttactctcatgatcctaagttaacagttatattattctttttcaagacaaagaggttttaagttaaccattagttttttttctcaagataaagaggtattccacccatcccattaaaaaaaatcaatcctaactatgaatgtgagtacatgtgtgttaagtttcgtagctaggattaaatttggggtttttcttgaacggaaggtgtagaagctaggcccatggaattaccttccatattgcccctccctcgtgtagtactcacaaggatatggtcgttcttaaaattacgtactctctagattgaccatgttttgcttgactaatcaaagctttagccaccgcaaccccaggtccattcaaacatttcaacatatatgctccagccaattccttcccggtggctgaaatattagtttcgctcgcctgccgagctagccaaactcaag

SEQ ID NO: 6754 - DNA, 2000 bp, Oryza sativa
cgagtcgagcacctggatgcccaataaccacacatgcacatgaagcccagccaaatacgtgaatgctttttgtgtctatgcttgtgctatatataaaaatatttaatttagatgatcacaagattttattcacataccaaacttattggtgtgtatatattagttattatgcacactaggcttgtgcacacatattttctttttaaaaaccaaaattattgattcgtcaatcaattgataatttatttttcaaaatatcaaataacaaatacaagtaaatgtcacatcatgccaaacgtatatatgtgcgctcaccgttcatactatgtgctgccctcgcttacactcatttttaatttgtaatattaagggtacttgttttggtaacataaaaacatgagataacacatggaataattagtgtcccaattgcttggtttgcataataagctgaataaaaacaaaccaaggtaaaaaaaatatttgcctaaggaaaaaatggatttatcagcttttagcgaggctaaaaagaggtataggtgattcagaaaagaattggcattgggccacacaaaaacgctatatctggattcttattggacaacattagtactttcggctcaatttggagcacttaaaatgtaggagtttatagatcctgtttgcacagcgccatatctaagacaaaagttaaatttgaagtttgtatgataaataatagtgatttaaaattttatattttatctaggatgggaacaaaataattcatcgaaacgttatcgagataatcttaaatctgaagtagtgccaaacaaatgccataatatatacgggctaaaattagttagcgcgtcaacggacgcgcctattttctagtattataaaaatacttctaatgacgaatctgaaaatatgaatcttgtcatgttaaactatatgatttataaaatttgatcaaaaattaaaatgtttgagtgcaaaccctcttcaagtaatttcaaatggataataaggttcagtaatcagtgtactccttttcatcggtcaagctttcgtccctttttttttctactagttgagaagaaggtatcacttgtagtgaggtagattccatttccaaagcctgaaaccgcaatcttgatttatcatctggacggtgacctttcaagaaaaacaccccctcagatcctaaatacctctgaatacaaagtttatccaattcattacatatcaaacagcagagagatcgaattacatccctcgtacrgctcggttacatgtggatccgatgaagatttacataaaaaatattacccatggtccgggtatccatggatacccgacccgatgagcacgggcgtgggagtgactttttacctatgggctcatccgcccaagacccgaagacgtcatgggcaataggcgggtttcattttttacccatgggtaacccatgtccgacccgatacatatgtattagctaattttgactcatttcttaattcttataccatttctcttggttcatttgtgatgctaacggatactaagttgtgatcaacttgtgatgtaattcaaattattgttgataaccgataatttggtaagttattgattttatttctctttgttaaattacatatctttcaagttattattcatgtgagatccatagggtacccactggatatactcgcgcccgccgggcatgggtacgggcatggagttttgcccgctaactctagtaggcagtgttcgggtgggcaatgtcgggcatggttttgctctacccgtgtctgacccgacccattgccatccctacacttgacactacaaaattaacctatcagtcacatggaggcaaagcctgaagctaataaacattcagacttcgtgggctattaatatttctggggtcctcttcagagtaagttcagagcgagcaacaagaaggaaggcgatcagctcgttcttcttctccctctcctccagcgacggcc

SEQ ID NO: 6755 - DNA, 2000 bp, Oryza sativa
gcgcttcgttatgggttaattcaaataaaaaaacccagttgttttttttttctgtctaagatacattcatatcttaacgtaagcttcttttctactgttccacttgctcgttccggaatgggaaagttcgcttctttcctcagcaactccccatgtgttcacgtgtagtatcatcctgccgtctctctcttactccgttagtactactactacgtactccaactccaattaattttgtaaaggcgtgttttccaactgtagctgtcatccatcactgaaaatttgtatcaccagcctcttattagaattaccttatactgttctttttatatttatctttatttagttgtcatggcatgtgcgtgatctctttgaatggtcaatgtcaatttgtgatgttttctgatacaatactattttttcgtgtggtgttcattgatgccttttattgctgtgttcacaccttttgtttagtagcagttctgatttagcgagatattgtgtatggtagtgccctgtttgaccaactacttcacgaggatttcctcattactcattactcaattggttgacatttatctgccttggtcagaagtgaagacttgaaaagttctgataataagcatcgcacagttatttattgtgatttccgcattactgcctttgctaagcttgatttgtctatattatcaaatttgacaatttggtaaactggcatgaacgcttactgtgtttagttgaatatattgacacgcatgcaagtctgacaattctttgtggtttctctggtttaaaatgattttatttgtcaaggtaatgccgcgaaatgcaacatatattgggtgcccaaatgcaaaatatgtatttcttttaagttatcagtaaggaaaccgtaaaatcaggtgtgctgtttccattggtatttatgacgtgcatacgttatcataaaatataaaatacagttgtggttgctgacttggtgttagtcaaaagatgtatttgtttgaacatgctttggtttttatgttttagtcaaaatcaataacagtacctatcttaggtcctgtttagattccaacttttttcttcaaacttccaacttctccgtcacattgaacttttctacacacacaaacttccaacttttctgtcacatcgtttcaatttctccaaacttccaattttggcgtggaactaaacacagccttagcttatgatggcaccaatgaactaatagatccaacaccttgtatgtcacaaaaaaagatggaatggatgtgatatgacatcaattcatttagttctggtatgtgtttgtgatatatttttgtttagctttcatgtgaggccctattcgagttgccatattgatccaatgaaaataaatcaagaaagtagtaactttagtccatgaattgcagtttgtgtctatccgactatgtttcagaaataacaaacaaatatattgttcgacgtggatacactttgatgaagaattgggatgaaaaataagtctggataatggtaatttaaggtgggcctaagtaaatttgttgaacatgcagattagtggagatatctatgcagatcttggagttgattcagaatttgagatcggcttctgtcatagtatggcaaactctaggcagggcttaattctgtacagtggaattgatctgtgaagataaggacttaaataggggtgtacggggtgtggatatcaggacaaagggttgttgttatatgccagtctgttcactatgttggatgtaacatacaaaaagttttgttctcaataaagtatcattaatatcagttgaaccgtcttttcgcagcaaggctcatctttaagcccttatgtttcatgttttaaaacacatgtctccatgttgattgcacatttcaaatgtgaaggggtgagttctgatgttgcacaattaaattgatacatctttctttttttctctcaacagggaatgtgcgcaatatgtttcgatccc

SEQ ID NO: 6756 - DNA, 2000 bp, Oryza sativa
cgattgatagtgagttggaagaaatcaaactaattgttttaatatactcagcactcatgtttcttctataggcagcagtggagaattgaccaagattgatagttttgtcaaagctaataatatataaattctgtactagtgtttgtgtaatctatctccgaggaaatttggaactaagtggttgctggtagagaaccacgccggctatggatggtcctagctagtctaggaagacattggtgatataaatcattataagaattgttagtgtatatgcatcactaagcatatggtgaaatttttatctatcaaaattgatgatgttatatgtcaaatactttacaccattcgttctaaaataaataagggcttgttcgaaatgtgagatatataggaaaaatattgaaatacgaaaaacatagaataggattgcatgcgtaaaatataggaatttcttgttcttcgtacacgtgattcttactacaaagaggctagagtggattcttttttttttcatgtgaaaacatgggcagggaatagtgttcctctggaattcaaggtagtaaaccctttgaaacggatgcatctacagtacccaattcaaaggaataatcaatcctccatttttccttcacattttctccattctgacgaatgagccctaaactcattgctacgaaactgaatataatcttgtctagatctgttgctaagatttaattctttttggaacggatagaataattcattgtactagacaatgttcttttcgacttccaatagcttattggaaggagtcacttccttgtttaccgtgaacatacttcatagattattgaacggagtatttttaaaacttttcatatgtgatatttttttaaaaaaaatcaaataaatttatttttaaagtttgcgatggctaatattaaattaatacgatggttatttctcttgttttgcatgtggcttataaggttaaacgaacccctatatcaaatggggcctagtatagaattgtacattgaagagttcatcaagtgatctgtactatgtaataccttttacaatattattgctttcagtttttatatcattctaattgattctgatagtgcagcgcaaacatcaaaaataacactaaccatagaagctaaacttagctaagtagctaactaatacaataacaacccccttgatatagacacaagaccaaatcctaaaaaaaatattggtgccttagaaaccaaatactattactcaattatctcgatataattgaccacaccaagtaatttatattatatcaacataaatgacataacgtagtaatgtaaaacaccgtatgaaaacaacttcacgttgtaataatttattagtactagtatattgcatctatcctatataaaaaaaatcaaaaacaagacacacctcataccaaaaaaagttaaacctataaataataaaaagaaaaattgctacacgtactaattttttcttactaacactgatgatttttatcaagataattatcatctcaagataatacgtacggaattttataacttctgtttatctaaatcaaacggttaagataattattagtaaaaatatagtaagaaaaatttagcatgggtagcagtgctaaaaaagcacaagaggtataaaaataaagaaaaaaaaccaacagcaagagaagagaggagaggaggtgtgtgtgtgacagtgtgtgagtgtgttgacaatagacagtgttgaccgggggccccatgttgacgccacctcacctcctccccttcccttccccttccctctcccctctccctcaccttcctctccaccttcctcttcctcccgaccaaacaacctccctcctcctcctccacctcgtcgtcgtctccgccgcgctgtctcctcctctatataccctcacccacactcgcacgcgcaaacccaacccccgcatatgcttaactccccaacccaaaccctcctcctccccc

SEQ ID NO: 6757 - DNA, 2000 bp, Oryza sativa
agctgacatgtgggccccatgtactattttatttatttttttgctgactaggatgtcacgtcaacaaaaccaccaatatatactgccataaaaacttgagtatacggtttgtgtaagtttagaggtacacatttctgattttgtagttaagggactttaaaaaatctcgatgttaagttgagggatctccggtgaacttattccttaaccggagttccttaacgttgaattatgtgcagctcaacaacgtcgactattacgtgcagtgaagaggtacaaactacttcctccatacattaagacggtttggtatcttcatcactcatctaaattaattacgtacatataaatctaatcacttatatgaaatgtatttaaaatctaaaacgtttaataatatgaaacaaaaaaagtagaaaacgggtacaaaagacacatagagggaaagagagagcgttcctatacaatatgtaaccagagctactatctcactttctataagcataaacggtacgtctttttaaatattcttttatataaaagttttctttaaaaaattgaaataattttattttttaaatgagagtagctatatttatggtgtcatatttttcacaaaaaatagttaacatgtatttacattataagttcataaattatatatgtaaatttagtgtatttataatgtataagttccaaaattttatatgcaagtctcaaaattacatatagtaattacatgtgtaagtggggtgtaaatttaaatcttactacattggaaaagttaaaaagcaaaagcatgagcagtataggagatgattttgagaagaaatcgaacggtccgaacaagcacaacctaagacatgtagtctcgtgtagtcacgtagagcaatcgtacgcacggtaaaaccgactgagattaggcaaaaaaaatatcgacatatttttagcagtccgttttaaatttgtaatcgttgatccttaactaattatattgtaatgactcgtctgtttttcatgtcgttaaaaagctcagctcatgatcsgattcaaaggcatcctaagttttttttttrgcttatggaacctcaacttmattgcagtgtgtatctcgaatgattccccttctttccgattgatcgtcgtagtgccaaaagtccaaaatatgacttagcattcataaaaaaaaaaactttcgttactcgttaaaatcctctcaaaatctcaatttcttcatcacttagttattgcccaattttttttaaaaaaaaccttagcattcataaatctaagggtctctttgaatcaaaggatttatatagaattttatatgattcaaattctatagaaaattttctatttggcttttgattcaaaggattgaagctttccaaatcctatgaaattcctatggaatgacacattgcatgtggattttggagaaaatttagcaagagctccaacctctttgagtaaatttcctttgagtctatctctctcatctgatttatgcgttttcctgcgctccttttaaacgaccattcctgtgtttttcctgtgttttgtaattctctgttttacacttcacttcctgttagaattctatgttttttctatttctctgttttttttttctaccttgcgaataaaaggggccttaaatgtgcatttaatggtttggaacaggttgcacaaaatccggagttccggacttctgtcttgtttatttgagcattcctaagctcatcaccgactagttaatgccccttgctcggttaatcctagattcctagtgtgagtggtacactaatcgcccttagagatccacgtcgcgtttgaccatgtccatgaccacctgagcagtgagtgagccagtcagccagtgagctactgagcagtgaccactagtaggttctactcgtcggcaaccgatcttgcctcgccggagaagacaacgcccgcggcggcggcggcggcgacgctctccttttgatgctctc

SEQ ID NO: 6758 - DNA, 2000 bp, Oryza sativa
taatataacttgtacgtaacttttaaaaatcgtggtaacatatcgtgttcgtgaaatgaaagtcgtggggktggggaggagggaccgaatcccctcacttgtatgatgtgtttttttttcttcctcatttacacgaaacttaaaacaaattttactatttaaaattacatgaaagttgcatacaaattacaatataattacattacaattatactaatttacgtttagcaaatttttggatgatagaatttttaggagaaaaaatatccataaatatatagcaaaacagttttaattattttttgataattgcaacacaatagtaagagaaatcaaattctacacatgattagagtcgaaaacggccagaaacgttacaacttttacgatacttcgttaccaaattccttcaccgttctcatacccatgtggatatattcttgcagaatttcatggctaccacctgcctagtacctctccgattactactcgctctacaatactccctccgtcctacaatataagagattttaagtttttactggtaacgtttaactactcgtcttattcaaactttttttcaaatgtaaaaaacaaaaagttatgcttaaagtaccgtagataataaagtaagtcacaaataaaataaataataatttcaaaaaattttaaataagatgagtggtcaaacgttgaaagtaaaaaatsaaaatcccttatattatgggacgaagcgagtagaattttagtactactagtactccactgctgtataaacagttactgaattactgatcatacgatggttcgatttgatttttagtagtagtactaaaatttttcccaaaatcatcacattttagacacatgcatgaagcattaaatataaataaatgamcaaastragtgsacagwtaggatgaaaatcgtgaatcttttgaggctaatttgtccatgattaaccataagtgctatagtaacctacatgtgctaataacggattaactaggttcaaaagattcgtctcgcggtttatagtgaattatgaaattatttttttattcgcatttaaaaaatatccgatgtaatacctaaaaattttcttttcacgaccgcatgtagtagtaatactgtacaacgtagtggtagcaggagccggaagggtgtagaacaatagccagtcaatgcaacctgagtgcaagaagaaagtacacgaggctacaaaaagraaaacggccagaatcctccacacaagtactacacgttgaacgggacactgatggccggcgtatgcatcacacatcacacgcgccggcaatttgttaatcctgcaaaagtcaatgaagattaaaaataagccccaagtttagttactcgatcaaaacacctcaaaaaaaaaaacaacatcatgacaccgacaaaaccagcaaagaaattaaatgtcgaggacgaaaaaacagatgctcacataaaaacagcttactaattacctgtggtactacacttgctagcgaatcagctacaagaacagcgatgccacagattaattctttttaatacccattttggtttttttctctggctattgttgcaatccaaatgacctcacattacagtgacccacacctttgcatgtcgcctcatgctttggttgctaacccttcacctaaacacacctaaagctaccccatttcttgcccattgattaataagctaagttaatccctccttgcacattttagtactaattcgcctacgacttctcacacacaaagcttcccttccccctaaacctgcaactgctactgctcctctttttcttttctttttcttccatcgccatcacctgctgctgtgtgtcctctgtccttcttcatcgccaatggctgccatgccaacaccaagatccttctcctacccctagctcatcgcaaaacaagctagaaatcgtctcttctcccaagaaaattcatctttggatcgtagagcgtatttgaaga

SEQ ID NO: 6759 - DNA, 2000 bp, Oryza sativa
gtataaaaaatcgttttttaagttgtgattggattgtagagttccttctaagtttgcgagtacgataagtgaaatggtgggtatttttttttaaaaaaaagagaggatacggaatcttcgttttgtacatgtttattgcattgatagattttatggaattgttagcatcaacttctttccgtataagataaggaagacgcacaatattcacatgttcttaaacatttttcttaatagttttttaacataaggtgtggcaacaattttggtatgtattgttgcttggaatattggattgtcatggtggttaagaatctcttagctgtgcgcgcgctatatgtgtttatttttaatcttatgtaaaaaagttatgatgttgttttataaattaaattacggttagttaacaatattatctagtattatctatgctacgcgtctgacaagaatatacttcaatttaatttatactcgcctatacagacaacatatatgacagaagctaaaagattgcaagattttgattctgaaattttgttgaatgtgatttggagcctgccacgccgaataacatattgttttttttttgaaagcaccataacacattcttttggcgtagcaaccaggagtaatttcaacaccaacaataatgatatggtcatgaaagtccaatttaaaacacatgcaacagaacagtgataatctgtaccattataaaaggaagttcgtttacgacttttcattttcacataaacatcatgacaaacaacaccaccatattactatcacccacgtaattcacgttccgatgcagcagatcaaaatatcttgtgaaataggaaagccctagtggtttgctagtcatgtgtgcatgactttacttatcatgattcaaatcctgctacccacaaatattactttatctatctcattttaagtacaaccatagttttctatacccaattttaattatctattttatttaaaaaataaaacacgtataaaatagcattcatgttttattatctaatagtaataaaaatactaattataaattttcttaaaataagttgaatcattaaagttggatatgaaaacacgtggttgcaattaaaattggaaggagggagtatgcatttgtagataggtttcaacatgattttatcaagaacagatatatgtctcttatagtgtacgtacgtatacgtctgccgtatgattaaaagaataatgggaaaaactatttggaaaaaccgtgcacaagtaatggctctccagtactcctccccatctgtcccacctgccaacagccccggcgttatccacccccaccgtccgtctcccactccgtctcccacccgcacccaaaggtgagaaccgttcggtgagaatacgtctgcagccgcgcgcaccacgcgacgtatccctcccgtaagcgcctccgcgatccccgacgccgcgaggcacgagaagatttcagataaaacccggccgttacacgagagtgagaggggcagccccgtcatttcctccccgtgcaaagattggatggataagcacaccccaccacctccacctccacctccacctcctccttccccttccatcttcctcctctcaactctgtagactctgctgctgcgatatatatctatcccgttcccaccccgcgatcttccgttcgattttcttccaccgtatttatagctcgtcctctcttctctcccaccctcgtccgttcttatccacctccacgcccatcacgcttgcggccgtttccatccttccgcttcatcggagtagttcgccgccgggttgggttttcttcttctcttgatgcgacgtggaggcggcgagttgttcgtcgggtgcacgaaccggtgatttttttttgttttggcgatgcctttgcgctctcctgccacaaccttcctcgaacctcgtttgccgcggcggacgacgcggcgccgtcgcccgcgtcgctgcgcctcccgcgcgtc

SEQ ID NO: 6760 - DNA, 2000 bp, Oryza sativa
gcaagtgatgatgaggctagcggtgctaacaaaatcgagggaggtggacagtggaaccaagacagtcggcgttgaggtttgtggtagtgacattgtggtgtgagcatagaggataataaggcggacttgaggtcatataaaattattatttacaattatttgattgaaatgcaaaaaaattcaaggattccttttacaaattcatttaaatagtcctactaaagaaaaagaaaaaaacacaaatgtttaaagattaagtttacatggaaggttgcttttctaaaaaaaataacggaggtgtacttcacaacattttcatataaaatggttgtgttgcccaaatgtgctttatcacacatttatttatttatttatttattgacagtagcaaaacaattacaaataaccagtttgaaatttaccattgctatttttgtaaataagaaaaataatcacaataatgagtaataatacatgcgataagaaaagactccaaactaagtcgttatattgaatatgattttgatttaaatgtttcaatgaccggatatgggattgattgttaggataattgatactaacatttaatttagaaatgtcacatactcatattcaaaagaagaaaatatggttgcataattttataagatattaataagatgatagcacaataattaaattgtttacaaataatagaccaagatctttataattttataaatataaacgtcatgccgagaatcagcaatatcaaacattttttttaagataaagatcatatatttaaattgtttacaaataatattttatgttaagttcaccggtacatctttccagtaataaaatttatggaacataaataagataccccgtgcttgtgtgcgggctacctccttagttgatctaatggcaagggttagatgatgatgtggcctcactgattttaatctttacaacagtaaatgatttgtagatgatgatgtgacctcatagattgtaagctttacagtagtaaatgatttgttgtagtgagtactaaattatataggaagaaaggaattttttttcacaagcagttaatgacactgagacgacatcagccatctccgtatgcatttaaaagtccaggttacatctgcaacagtgtggcatatctcaatgcatttaatctccgacgatcatgaacatcaccacgggcttaacacgccacggtcatgagttgatccatattgtttattggatgcttgattctcgtggccaggccaacaattcgtttaagagatgcagggttgattgtgaagttaattatttaaaatctcaattataattttggattatatttaaatctgggcgattgcaaggtaaataagaaaatattctctagatcgatctaatcctagagcataaataagaacattatgacttataatctccagtgcacgattgggttcttgattttcctgtgaatcactcatttgatacagaagaataagcttaatgcaggagtatggtgattgtgcagaaaaaaaattccttgatcatcggccaggttgcagcttctcccaatactataaacgtaagcacagctcctaaagctggggatgactgctttgcacgatgatcaagctaatcacaccagtggaaaacaatgtccatactccagaccgtagtagctgcttcgtaatgcagacctcacgatccaaaacaaataaaatctctcatgtgattttgttcaggttatattatgttgtcaatagaaaatttattgcggttttaaacactccatagaacatgtgaaggttttctttactagtttttttttgtgtcatttaataatggaaacatatttgggagctaacaaggcctggttatcgatcaactagtataaagccaacagccaactgctagagttttcattcataggcgcatcgcatatccacctctttctctctgtaaggcaactaattccataagcacaagttcttccttttgcatcgacc

SEQ ID NO: 6761 - DNA, 2000 bp, Oryza sativa
gattcatgagttacctggtgcctaaaatttcaaatcaagttattgctaattagcagtttggcatgcccattttttgttttatactttgctccatccattattgtttgtcattgctgcaatgcattgaagacaaatttgtctgtactagatggtagagaccattactgtacagtcaaaatgcaagtagccctgtatttgccacgagctttgtaaccaaaacaccttataatataaggtgtactttgattctcccgttcacaatccttgcttggagttggattccctgttgtggcaatatcatcagaccatagacattcagggagctgtctgggttaagctcttgcataggaggcccactcagctaggatatttatttcctaagttatcatgtctgggacttgatcttaattcagcttatcgtccctctcgacactgtttcgaattgtgattatgttatgggagtacaataattccgaccccataggagcttgtggggctgttgaccaaggttggactcgtttggaatgtcgaccagatgcagctcgtttttctttgcaaggaaaaatgtaaatgcatgctatatctttcttctctcattctctgctattataaatactgggattctccattccataaagctactccgactatctgagtgctgaccgttttcatttatttgtgccacaaactctaaaatcaactgcgtgattcagactttcagagcagctgataggtctgcctcgggtcattcagatttctctttgccagtattgctaggattcagtctgctaaagtctgggagtttgaggaggarccagagagattcggagagagcagcaggtttggaagccaagacatggtccttgcacagctcaccaacgactgatgccactggagctccatctgcagcaaaggcaacaaaatagtacacactgggtagtgccccgctgatgcccttctgctactctgcccgacacggccatgtggcgtcgagcagaaaccttgtgccaagaactggccctttgattccttttaccaagaccctctcccattccggttcatgaacttgcacttattcactgcagatttgctccttgaatcgtacctctgatcccggtaaaaattatgctagatgttgcatatttttgggaagaggtttaacctatttcgtggtgtcattgtgattgatccaagtgctctgaccttagaccttggttacatgtgctgaagtgcattttctcttttaactgaatatacaggtgtcgccaggctgatctgcaggcacaactgttatttatttggaaaactgttaagctactgtggtagtgtgattatcgcattttggtggtcactgcttgatagtaactaaaagacagatcggtctgagggggatcactgggcattccacgctgaaatgaaaagactatgcttattaattgggagggccactggggaaaatggctttgtcggaggactccagatcggcatgaaaatcgctctggccactactatctgcctcaccgttaaccctaccgaataaattagtaactgatatataaggatctaaccacaagatcatggtgttaacctcagaaaacgaaacacacggagggtatttttacagatatcacctcgtggcagctgcattactagggtattgacattgtcagttttctctaaaccacagtaattagtcagtttcaactcggttagactgatgttttagggagacaaatagtcgagatccgtttttggagttcgtttcgattcagaggcggcatttttctgcaccttcawttatttgtaggtttacgacagcctctgaacgcagctgatgcagcctcagctccatctactcctctcatgaatttttaaggcaagcgtgtgtcatacagctctcacactctctctcagtctctactcctagctcgagctccaatctcttgctcactctctgctcagttgttcagagctgcgtggctagtggggaagtggcagta

SEQ ID NO: 6762 - DNA, 2000 bp, Oryza sativa
taaatttctatatattctttcttccccacacacattttctctctcatcaacttacaactaaattttggagacaaaaaaagtgtacaaaacataggtgcaaatgtagtatgacaaaaaaaacattggaggatgaagttgcaaaccttttaggcacctccgatttgtatgtaatcaccaaaaaaaaattcaatagaaattttggcatgacctcccctcttttttgaagaaattttgaagcttgctcgggcagctggaggaggaagaagacatatatataggggtgggactttagtcccggttggtagcaccaaccggggctaaagatcaccgggatcattagtcccggttggtattaccaaccgggactaaagttaagatctttagtctcggttagtagcaccaaccggggctaaagatcaccgggatctttagtcccggttggtattagttaagatctttagtcccggttggtgctaccaaccgggactaaagatcccaggggggcctgacaggtcctgacagcattcgaaccgggactaaagatgatctttagtcccggttggtaacacaaaccgggactaaagatcaaatatgcccgttacccttttgaaccgggactaaagatcatctttagccccggtttttattgcatccgggactattgtggaaatcggccgaccgacgaaagatggtttctccaccagtgtgatggtccagattccagagaaccgaccaaaacttgtagtgccatttatcatactaggccaagtactagcagttctagtggcatcgttggccaacatgtacactgcaaacgcccaatactccgaactcccttgcaacactacgtacaaacttcaaaacattgttttggccacaatatttcagagcttaattgttcagaaaaaaatcggaacttccctgcaaatactatcacaacacgtgacaacagttgtccaactctattgttccctgcccttaatgaacattatataatccttttattatgatgcaattatggccgcaacggggcacgtcggactctaccttattaggctctttctcccgtacgcgcaaggaattctaagggaatctgactgattgcaaaaaaatccttgtcatgctattagaagacaagatagcttcctataattaagagagagcaaaacggcaatggttatcacctgatggattcagacttcaagtctgcgaccagtgtaaaaccagtttacagccttacaggggtttgcatggcttggcctggcgcttcttcctccgacgacgagggagttcaattcaactccttcacttcagctcacaccggacaatttctaacgttagctgttgcttcgtgcaaaccccctagacctgacagatgaacagtatcttctgaaacagaaagaaaaatccaaatttcacacttgaatcaccaatctatcacgggcatgcaggggctgtgaccagtggaaacccgtcatctgtgatccataattggtcgatgcaaagtcaaaacaccagcaaacaacagggtaacacccaactttaggtaacgctggctcgtgctaaaaaaacaatgatgatcatatctcctatggtaagttcgctactctcaacctataaatataaaccgtactgaacgtacagagggagagggatccgtggaagcaaattaaaccgtgggagcgcacgagttacgcggttactcggcgagccgagcaccgccgccgacctccggtgagatattttctttttaactacctcggtgaagcacggccggctataccttctcccgttggtacaccgtacacactgtataaaagcgatcgcatactcgtagcgggggccgatcccgaggagagaggaaggggaggggcgctgtattaattcgaacgtaaccaccctccccgtcatcggcggcgagaaacagaagtacagaacagagaagaagagcgagagaccgagggaggaggaggagagagaaggcgaggcgcaaagcgcaa

SEQ ID NO: 6763 - DNA, 2000 bp, Oryza sativa
ggcttgggacagcctcgtcaatgccgcggtggcactgatcttttttattccgggcgcctacgaaaaatatctggcgagctattcgtcatgatcttctgtctcttaaggtcagtgaccagccctaacattccattaggcgcgagatatttttaaaagaacggaccacttgccgagagatcttttagtgaagaacgagtcgattggcttagtacttctctgaagaaaatattccttgtcacgaggtataacatcaaaggccgttttggattggtgctaaactatggttgtgtttagctacttctaaagttggaagtttgggttgaaattggtacgatgcgactgaaaagttgtgtgtgtatgacaggttgatataatggaaaaaattgaaagtttgaatccaaagtttagatctaaacagtctatgtcttactagtagtttaaatagtatcatctatattgtaacatattctaacccagataatgtgacacaatatagtgctgcaaactttgatatgaccaatgacctagatgtatcctatctgtgtttagttactatattttggaacggagcaaataaatatgattgtttggtttgaagccaaaagcacatgctcaatttagcacaatactagaacattcttcatcctaatacaaaatttggcttctaattgacataaattaaaaacacttgtttacaatactatcctatcaaaacattgttcgtaccaaaatttatctagtttttgacaatatcaaaattttggtaggatagtaagccaaacaagcatgtaaaagtagttcttgtgggctgttaaaaaccaacaaccattagaaatgtatcaaaacagtccttgtggtttatttgcagtaccacttcgactatttagtacactaaaacacatctggcaatgtagaaatgaaataaacactcggacattcggtaatgctcctcaacaatcggcgaaacgaaacgagagggaagacataatagtgtagagaaaattgacacacgtaacaaaactaccattactagtcaacattaccatcaaacaaatatatcaccgtctttcccacaatactacaaaatgtgaactgcttctctttttttttatcagaccagttccatgcaacatcatgatccaaggaaaatatctcgtaagtcataaccaccatccaccaacaaccagttgacggcatcatccaatcggagaaggagaatggcatgaacttctcatgcccaattttccttttctttttttttaagaagggcatgtttagatcatatcctaaaattttacactatttcatatcgaacgtttgaacacatacatgaagggttaaatataggctaaaaaataactaattatatagattgtgactaatttatgaatcttttaagcctaattgccccatgatttgacaatgtgatgctacagtaaacatgtgctaatgacggattaattagacttaataaattcatctcaccgtttattgactgatactgtaattagtttttttattagtgtccgaacactccatgtgacacgctatataatacacccgatgtgatacgccacactttacaccccgatcttaaaacacccccgaaaaaccacaggctaggtgtgcagagaggatcccgcaacgccgcacgccactgtcctccgagagagataatttttactcgccccaagcgtcgtccaccgtggccacgtggaaaagcgacgccacggcggataaaagagctccccttcctcttccccgtcgccgccgggcacgaccgccacgcgcattccatttcgacgacgaggcggcggagctagggtttgcggcttctcttcctcggcctatctctctcgtctcaggtatagagtgctgccgcctctcgttgtgtgttcgtgtgtttgcccgggatgctgatgcggttggtgttgggggcgatttttttttttggttgcaggtgaatttgttgtgtttgtggtgggggacttggaggggag

SEQ ID NO: 6764 - DNA, 2000 bp, Oryza sativa
tagctccagctatagtggagccacccaagaagcttacacccagaaaaaagctcgcaagcaagaagaaaagtgcaacaccacctaaacttttggattgaaatttgtcaacctgctagtgaaattggttatttgtggtctactatggcatgatattttggaaaaactaattgcaagtaatgtgcgatgatatgtgcactttggtatggcatattttgctatgtggtgtgaatatcttaagtgtatggcctaacgaacttaagtgtatggcctggcctgatgttgctatttctattattgtgcttttgtaatgatgtatggccttgcgtaatggcatgtaacttgttatgtatggccttcacagtaactctgaacttgatagtggttatgaacttggtagtactatttctaacgatgaagaagttattatgggataaaaattgatttttgttgcgcatgtgtgttaatgatgcagtatgttatgtgttgagttgttctcaagttattatgttttatcatttattcatgtgtgcgtagttgatttaattgtattatgttggctattaaccacttgagaatggaggggtaaaattgtcatttcactaggccggtccatgctggcatgctgatgtggtgctccaacccaacgaaagtggcaaaaaattagggcgtaatctctctctagtggtaaatatgttaggccaaatctaatagtggcatatggagagttgacactcgtaagagtggcaaatagttaaatttcccgtccacaccaccctagtagatgaaggctgtgttagttgagcgcaaaatttagattttggttgaaattagaaatgatgtgactgaaagttattatgtgtatgacatattgatgtgatagaaaatgacggaagtttgaatccatctaaacacagccgaaaagaggaagttgacaacatgtcacgcgtcagcgacacgatgacagtaatgcccatcacatcctccgttctactccagtacactgtaacactgttgttggcgattatccggcggcgtcacctgctttatacagaaaaacaccaaagcttcgtgagttcgtgtcgaccaggccacgcttcctgcacagacccgcccaacccgtcgcccggcgcggcacgatggcgcacgcgcacatgcgaccgcacgcacggcaccacacacacccaaggctttcgtgtcaaccggcgcggcacagggggcgcatcccgctgcccaccatcgcgcggcgcacacgatggcggcacacgcgacctacgcgacctgggcgcgcgcgcgcacgcacgcacggcaccacacacacacacgtcccgggccccgtccacccatccacccacccggccgcgcgggcgccgcgagccgtacgatttgtctggatcccctttcccccccgcgccgcggggcggggtcgcggggatagtggtagccatcgagccgaaaggcgcaaaccgaaaaagccgtggctgccgttccagcaccagaccaccctctggtcccccacacctcgccgcaaaatcccttcctcgcgccgccgccgcgcaagccgccaagggtggggcctctcgtcgtctcgtctcctctcgtctcgggcgcgcatccccagacgcgcggtgacgccgtcagttccgtaaaataaccccgtcgctccccaaccgcttctttcgcactcgccgttttggttttcgttcgctgattcgctctcgtccccttccctctcctctctcgctcgctcctcttccgcggcgcgcgcgccggcgtactcgccgcgtcgggccggccgactaaccgccgcgtagggagaagccccttccccttgggggggggggcacccatgacgtcgtgcgggtgcctggtgctcgagaaggtggaggaccacggcggcgaggcggcggggaaggggaaaaggaagctcgcgccaggttgccgccgccgccgccgttgcctgcggatcgtgcccgggggagtggaggagccggtcggagacc

SEQ ID NO: 6765 - DNA, 2000 bp, Oryza sativa
tggcctaaatgagctgcatatatgaatcaaacactgtgacttgaatatatcaccataattgagcaaagatttatgctataaatgattaaatatatcaccataactgagcaaagatttatgccataaatgataaacgaacaaaacaaagtgatttcagagctatagatacgaagaaaataatgtgacttgaaagatatcatttcataactgagcaaatatttatgccatagatgagctatatatatatgaataaaacattgtgacttaaaaagatatcatcataactgagcaaagatttatgctataaatgaagcctacatacaaacataacactatagcttaaaagatatcatcatatctaagcaaatatgtatgctataaataggactctacatacgaacgaaacactgtgacttaagggttaccatcataaccagkgcaaaagatttatgctataaatgacaaaacagaacaaaaacaaggtgacttcagacttgagggttcatttccttcctcccatcacagcagcatcggaaaaaaaatcgtcgctgctgtacgtcacccctggtttgacactcgcgcgcagcctccacagcattggaaacgcgcgcacacgacgagaggagcaggagcccagcaaggagagaagaaaaaaaaggaaaaaagaaaagaaaagaaaagaaaaacagagaatgcgtggggcccgcgcccaccactgtggcgcctgacacagctcacacctttgacgaaacggcagcccgtagcccccgggcccaccacacccccacaccccagaggaaaataaaataaaataaaaaatataaaaactcaagaaaaaaaaatcggggacaaggaaaaagtccaaggcgcaggacggagacgggcgcgatggacggcgcagatcatcctggggcccacttcggtggccccgcccgcggtatttatttttaattttattattattttaatccgcccgaggaggaataccagagagcacaaagggagaaaagaaaatttaagaaaagaaggggcaaaaaagcgagagcactgccctggccccaccctcttccccaccaatttgtttatttattcatttatttattttcttcttcgttcactcagtggcttgcttggactagtactggactctacttctactgctgctgcgcttccctgcttgtaccagccgagggagagagagagagagagagagagaggggcagccactccctctcctcctcgtcgtcgtcgtctccaccggtggaggtctcagccctggctccagcgaggtgaggtttttactctgctgttcttgccctttgctggtaggatcatgcatgcgtatgcgtttcttgtttccgtggatcgagtagtagcagaggcagctgtttggggtttatgggggagtaaatttctgtgggtttttggggattggttttaggggggagcagctgcaggggtgatggccatggttgtggagtggagtggtggggtgtggtgatttttttccctttttttttttctgttcttgtaggctcaggtggtcttggattgtgtcaggttgcctaattttggtagtattgattaggccaccgggaatgccatgttgcgtgcccgcgtgcccaattttagctcagctcgtcggaaatggcacccgtktgcgccgcatgattgtgaraatctccccccctgcatcgcccaggtggtgctgtttcttgaaatcatccagtgaggtggctgttttttttaatatatatatggtaatggaatgattagggctatcagcaaatttacccatgtgttgcttgtttcctatttatatatggaaaatgctcatgatgtgatgtgatccctgtgttagagttgcatattggggctcaagaatttctaggttagagcatttggtggtaagcttgatagatttgtgtgtatgatcagagtcaagaggtgattgatttgtttgtgcaggtagggtgggaggggagtgattcatggagggg

SEQ ID NO: 6766 - DNA, 2000 bp, Oryza sativa
ctttttcccagcttccttggcagccaagttatttattcggggccacctacaaatcaggcgttgttccaccatatagatcgaaattatttcaataactagattgaaaatgtttcagtcgtttaaaaagctaaaatgcgacacctcatgaaatattttgctacaacgaatgaaacaacagtttcccaaaacatcgggcgctatttcgccctatgtaaaaacaatgtttcaacaaatagaaaaaaatgttttaattcactacaatatttgatccatacatagtgaaacatcacgagtacattagatgaaacattttttgtggaacaaaaaaatgaaaacagattttgctaattgagggatttcgtaatatgtgggtgatttgttgcaaaagaatgttttatttcactacaacatttgatctgtacacaatgaaatattacaagtacactagctaaaacattgttggtggaacaaaaaatcaaatggatccctccttaatagggcgtttccgttttatccgagcaactattgcaacggggcgcgtagtggtgggagcacgtggcggcttgcggacgcgcgtggtggggcctgggtggcagcggcgcgaggcgcctaatgcatgcgcgcgcccgcattgggtgcccggccgggaggattttcctaattattcctgtgtgtttgggtttttttagttcgaatttgttttcttcataatttttgggctagtttgtttgcccaattattgatctgtgtttggcccatcatgttatgatgtatttttcaaaaaaaaaaaattctagtccgctggatgctaatccakgggtatataaaaaaatgggtgatttcgggtgaaaaattacccgacaaatggacaggcaattccttttgtatttactaattgatgccccacactttgttacaggatatatgttagatattagagaaatgataaaataatttggattgaaatattatgaaaatgatttgagaatgatgatttagtatgtgtatgtttagttttaaaatgaaataaattatagatataattactatatgcttacatgttgagctttgtatgataatgggttgatgtagcatgcttgcatataggtttgaggtgtactaataaatactatacttgcatattaattgaggcatatatgtttagtggacattagctttatagaaagaagagatatggccagataaatttatcttcgagtaggattcagagaaaccttatagaattcaggcagatgaaatcctgcctccctcaggtcgaattctagtgtctcttattcccacggaacgattttctttcttatccgttatattttcatatttgagtatatcttttcatataatattaggtatgcggtatttcaggatattactaacaaggatagaccttatccgtacaatgataatatttgtgataaagattgaacttataagtgggaataagtcaaacagcacctacactatataacaatagtccctacgataggtacctcacaactatcagtacgtctcgcaatcaaccgaagtacagatgaagagattttaagtaccgatgaccgtgactgcataccaatacggccaattggcaactgctcatcggaatatgtattagagcgtcgtgagcacatggaggtagcatagcatagtactccctccgtattttaatgtatgatgcctttaactttttaaccaacgtttaatgtttgactattcgttttattcaaaatttttgtgcaaatatgaaaatatttatgtcatgcttaaagaacatttgatgatgaatcaagtcacaataaaataaatgataattacataattttttttaataaaacaaatgatcaaacgttgaataaaaagtcaacggcatcatagagtaaaatataaaggtagtatcagcgtgagatgaataatgaattctcgctcgtgagtcgtgacagtagaagagctatcagagtatcagtagaaaaatcttagcatcgatc

SEQ ID NO: 6767 - DNA, 60 bp, Oryza sativa
ggattaaacaatttaaaagggggggccggccgccgggaaggaagccaaagccgaagccga

SEQ ID NO: 6768 - DNA, 2000 bp, Oryza sativa
atttttcatatatcgttcgttcagctttggcggcgagacacggcacaggtggaaaatacatgtccggatcgatgacgtggacccatgcatctagctcgtgtaaatttcgctttcttactcgcgactcgcgagactcgcattttcaagtcaacgtttttgttctcttctcccatgcgcctcgttctcctcaccaagcaaccaacggggacaagccgccaatccgatttgattatttattggattagtcaatatgcgatagtagtttactagtagttattagttaaattgataatcagttggaaaggataaggcgtgacggcagatgcttcgcgccatttttcaaaagtaaaactttaggaagctacgagttcaatcatactactgactaccatttttttttaaaaaatactaactaccatgcatttcattttgtttttctttaatatttctatctaaatttttaaacctacaataacttattttaattcttttttcttgtgttgctgggtcacagttttggcctagacacgcaacatgataagcaaaaatcgttctatacgtgtagttcttaatttaactgttacgacgctttggtttccagttatgtggaatttaatctctttatgttatacttatagtatgatcaaagctaaaaagcctcgttgattagcggcgatgggacatgaatacttggcgaatccttctagctggcccttgctgtcggaaagctcgaaaggtctggttacgtgccgcccaaatagattaaggccagaataagtttccctttctttatattactatgtaataaataataatgatgcgtatacagtacaggtacgtgcaaacgtaaggaggttagggatatatataaggggattatttccatggacgaaattaatctattttgctacaaaaaatggctttgtggaaaaactgaaaattaatgataaacttcaaaactatatttatttaatctaaaacttgaaaaccatttgcataaagctaaactcccttttaaccataagaatgttaaataaaaaaattataatgtcatggtattatatacatgtcacataattcgttttcaatcataagcacatatttcctctgtcccataaaaaaacaaatctaaaataggatgtgacatatatctagcactataatttggacagagatatgtccagatttataatattagaacgtatcacatccagtactagattgattttttacgggacggagtgagtatatggttatcctcttttacgttgaataattataatgatttttaaataattactccatttgagggtgtaaacaaaataatttgatattataatgcttaaaaataaatataaagaaaaatcatatgtagaaagtttttattaaaaatacatattattatttaaaagctcgagaaacgtgtatactattattccatgcccttcttctgtaataaataaaaccataaaaagatcaacaataacacattttttctattgttcatcatctgaaacaatctagacgtctcctccttccaaaaatgacaaaatcagcctctgcgagacaagccgagaaaacaggatttgcaacttgcaagtacgactactaaactgtcgtcaatggatagataaaccccttggaccaaaaccgcttaaacccaaaacaatccacacaacaccatcccccgattcctcccccctaccgtctaaacatggcccgccgccaggtgggccccggccccacccgtcatccacctgattgccaataatccgatgtgcattaaacgcaccagaaccgaacgaaccaatcmcgtctcctcctcgctttgctcctcckcgmttysskmstcgcgatycygsmstccwcstaramsswmskcgwaaaatsgaaggcrawwwmtcgarswmyktmtcgmgctmcgwmwcscgakmcgaaccmcccrasccgagrcsscssmrscygmggcggcggcgrctgcggcggcggaggcgagcggg

SEQ ID NO: 6769 - DNA, 2000 bp, Oryza sativa
gataaaacaagatcgaagtttgaacccgagaaactccctcttccccctcacactcctactgtaacctaaaacaccaacttggagggctccttggatcatgccggagctggagctagaagagcttgttctaataatgaatcatggaattaatggctggagcaaatcagaccggccacaacttccctaatgttgttaagtttgtactattcatgctgttggtgactttgctctctttctctaaatgggtattcctgaaaaattgaatggagattggcatttataygggrsatgcatgcatggcggactgaaagagggtctgtttattttgttgttaagattaaccttcctaaattttagttataccaatgtttgataatttttaacattacggaattttggtagctttagagatgtttagttttatgcccttttaaattttggtagtgtttttatgagaggaaaatttcgaaactaccaaattttagtagaatgtcattggaaacatcatatttagtttattatcttactaaaatttagtaacatcaaactttaataaggttgaaaatgacaaaaaaataaaagccgcacaataattgagcacgtttgagagagctagcaagtagttatacggtactccctccgtccaaaaaaaaaaagtttatgtcataccaaatgtgtatgggctgcaagaaacgggcccagagcaaggtgttcgctcgccccgtacataattaggccttcctcgtttggtccatccaactttgagcaagtaaaggcgccttcctctctgatcgatccaacgcacgagaagtcgagaacgtcctacctcctactagctgccaaggtaaccgttcctgtcatgacggttacctgcatattactgtaaaaatcgtgtggttatctcgagacatatcatggttttaaaaaactgagaaaattactatacatgatagcagcgataacagtaaggttttataaatactagtgtgatccgcaatagccaattggacgacttaaataccacttgtcgtgtcgttctcacttgtgacaggagaattcctcacatctcctgggtgtgttcgtgtgccaattttgtaccgtgttatttagaaaatatattactagaaacttccatggaattagggtttgtttaattctcaaacaaatttttttacgttgttacatcaaatgtttggatacatgtatggagtattaaacgtagaaaaaaaaaccaattatacagttcgacaggaaatgccagacgaatcttttaagcctaattatgtcatgatttgataatgtggtgctacagtaaatatttgctaataacggattaattaggcttagtaaattaatctcgttgtttcctagcggaatatgtaatttgttttgttattacactagtttaatactcgctccatactcacaaaggaagtcgtttagaacatcgacacggtctctaaaatacaactttgacttcttttttctataaaaatattcattgaaaattgatatatgtatacttttatgacagtatttttcaagacaaatctattcaaataatttttacattttcaaactcaacaacttgagagttattcatgatttatattcccaaggtttgatttaaatattgtcctaaacgacttcttttacgagtatggagagagtactttaaatgtgtgtccgtatatccgatatgatatgttggggtaatttatttttccaagtaaacaggcccttaaccgagcgggccgagattcactggtaggaacgaacatggacgtatcgtctgtcctcgttcaaaatgaaccacaaactgatttgctcctcccgaaggttccactgaatcatcgaatccctctcctctcctcactcgtgtgtttccctccactccttcccgccacaacggataacacctcacttcctcaacactcaacacagcagagcagcgcaaaacagagcagaccaagagcaaggagacgacgacgacgacgacg

SEQ ID NO: 6770 - DNA, 1810 bp, Oryza sativa
gccccttaaggaccgcctggtattaggattggggaacctaaaaaacctttttaaaaagttccccttattcaacawtccgggatggttttccgattacctaaatttattaaaattawttawaamyrttagaacktaykamattaaaatmtcmtyccataatcttggactaattcgcgagacgaatctattgagcctaattaatctatgattagccyatgtgatgctacagtaaacattctctaattatggattaattaggcttaaaaaatttgtctcgtgaattagctttcattcatataattagttttgtaagtagtctagatttaatactctaaattagtgtctaaatgtagggactaaaattaagtccctggatccaaacactacctaagtctgagcttaatgtaaacgttacttactccgttttatattataagtcaaacttattaaaaactttgatcaaatttatacaaaaaatgtaacaacatttatagtactaaattagttttattaatctaacattgaatgtattttaaaaggttttttatgttgaaaatattgttatatttttatataaacttgatcaacgtcaaataattttgacttaaaaaaaaggtcaaaacgatttacaatatgaaacaaacagtatgtagtactaaaaatataagtattaatcatacaaccatataatatatcttgggaaatactataacgctagcatctttaggtaacctgaaactccttttcttttactccatttggcttattttaagtatagttgtcggttttcgtatcctatgtttgaccgctcgatctatttaaaaagtttataaaaaaattaaaaaagtaagtcacacataaagtattatatatgttttatcatctaataacaattaaaatgctaactataaaaaaattaaataaaacatgtgttgaacatgaaaatccacaactgctcttataatggaacggaaggaaaggagtactaaattcttaaaaatcatagattaaaatgctgcaaaacagggagttgtcacatgcttgtccaaccgggtggatatagtaaacgccactattcctgtatttcatacacatatatatatggtatacacttaacttttattatatctatcgatgatgaggacgtgacaacctacgtgaaaaagctcccccatcgctggtagcgaaagcgcaaccgtactatagccaagaatacagcacgaggcgaataacccggagcgaaaaacacgaatcgcaaagcaagatatcatcatcccctcggcttgtttattattcctccatctcgcgtttgctcctccatttcccccaccttttccgcgtccccttcttctcctcctctctctctctccgacacgcccctttaactcgctcccgattccaaaaaattccgccatagattaaagcgagaaaccccaagcaaccaccaccaccacgacccggagtcctcccggatcgatcagtccaaccctgcgaatcaaatcccaagccttctcgacgctggcctcgatcgattgggaggccgcgtctgcgtccccttctctttccggaggaagctggtggcttgctgtgcggcggtggcatcgtcggttggaagcccgggggagcactcgtcgcgtcccgggggaaatcgaatctagcggcggacgggcaatgcggttggtttccggggttatttgaggcgggaggctgggatctgggtctggaagggaggttgggagctctgtcggtggggttgggggttgggggaagttggtggcgagtcgaccgcgtgctcgggtttgtgagtgag

SEQ ID NO: 6771 - DNA, 2000 bp, Oryza sativa
cgtcgtcgtcgtcgtactcctcgtccacgtccgcgtcgtcgcggatgtctatctcttcgtcatcctcctcgtcctcgtcgtcgtcggagacgggggcagcggcgcgggaaggggagcgcgcggatgggaggcggagcgggccggcgcgggcttgggcttgggcttgggctgggtgggaggggaggaggagaggagcgggtggggtgtgggggagcgcgtggcgggaggcggaggagagtgggaggaagaggaggaagtggggggcgaggcagtgcatggcgggagggtgtggtggttctcgcgcgggggggagaggcggggaggaagacgagataatggcataaatgctcggatttttgttttcgtaattccgtacggtggggcgggaatttggaatacgccaacgcagtgggtttacgcctttacagtctagcaggactgtaggaggcggtatccatactattttttattataaaaattaagaatgtttttgttagtactttggtacgtcatccatgtataaatcggtttttaagctcgttcgcttttagaaatacatatctatatttgagtcgggttttaaattcgttcgctcttggaaatacatatatgtatttgtgtcgggttttaagttcgctcgtttttgaaaatacaaaatgagtcgcataaggaatcttttttaaaaaaactagcatgctaacttgagctgatcagactcctaattgcaactcatgtttttctagaaaaatatatatccaagcgaattctcatggtgaatttcacattaactaaactatataataataagattaaaataaatttcacccgttgcaacgcacggacattttttctagttttttaaaaaataaaacttgctcacaacacgcgtatcatcacccccatgaatggacatactatctctatgagctcctccgaaataccatggtcatctcattgtcgacggatgcattgcttatcactgaaaaaaataaattagtcgttaatgcaattacattttgaacttgaactcgagtaaacatgttccaccataagttactccaattagttgagttacacttgatttgtatcataggaataaaaaaaatatatattttttaaaaaatatttttagagatatgaaatacgtaaacaacaatcaaataaaaacaatctctcagtagttgatgaggttaagaattcatcaccggcctttgtcgcttcgaaagcaaatgttaaaagagacatattcgtaggtatttatatgtagtttgatgcgtctgtttcttctatatagcttatgcttcgaaattcttccataaagttggagttgtatcaaacacttctgaaatcctcaggataagagtgagactaccactctactttaaaaaactaaactacaaggataaagtggtgtttaataaaaattaaacaccgactctagtttgagcgctaatcgctttattttaaattgtgctagcttaaaaagaagttctcctgggccaagtgctcgagtagtagtaaactgggctccaccaacaaatggacagcttacacctagcccaaggccccaagctaaggcccaagatgactgaacattctcaggcccacccactcccatacccacagtcgcagcggcagcactgcagcctgcagcagaagccagatctgaattggagccagccaaacccgacgtggacgaaccgaacaaacgttcgcaccccccaccgcaccgggtgactggtcccgtcacttgaaaagcacggaggcaacgaccgactccctcctcccccctycccgtctcaaatttgcaccacccccaaggccaacacccacacacccccccgactcgcctcgcggattccaaaagtccgcctccaatttccccgcactccccgaatccccccaaccacatcacatcacaccagacgccaccacgccccccgagatctctcccacccccgaccagcctcgagatcccagcgcccatgtcgtcgtcggcc

SEQ ID NO: 6772 - DNA, 2000 bp, Oryza sativa
  misc_feature (1)...(2000): n = A,T,C or G
catatatagcaataggatcgaataccacatatatcaaattggcaggataatttgaagtagggaccactaatagttggaaaagtaaaagaacaacctaggctcaacctggaccgcaactgctggaattggctggtattagaactggaattggtaggtgccataattccaaattccagccatttcggccggtaccgaaatgaaattgataacatttggaaattgcaatgcttatcacgctagcttctaagcttcatgctccgtgtcaccttccactatgtatttttttttttaagtaaagtccatcaccggtctctaaacttgtaccgttgtgtcatcccggttactaaactcgcaaatcgaccgttcaggtcctcaaacttgttcgactgtgtcattctggtccctaaacttgcagatcactcgtttaggtcctccaacttgttcagttgtgtcacaccggtccctaaacaggacggtctagagactttatatcaaaaaaataatttataactttttcatgtgaactctaatgaagacaaactttatatcaaaattgtagctctcgatgcgacctacaactttttagttggaaagtttttgaattaaaactgtttagggtcccaaaatattgttgcatgtttatagattttgaaattttaattttaaaattgcattttgggacaaaaaatgacttaaaataaaaaaaaattcaactacaaagttgtagaccgtgtcaagggctacaaatttgatatnaatgtttaatcttccattagagttcacaattaaaaagttatgaaattatttttaaaatataaagtctttagaccgtcctatttgacccagagataattaaattccaagtttagggaccggggtgacacaactaaacaagttagaggacwtaaacgagttatctgcaagtttagggaccgggatgacccagtcaaacaagtttgagaacttgaacggttgatttgcgagtttaggtaccggaataatacagcggtacaagtttagggaccggtaatgaactttactcttttttttttcacaagtcagagtgagcaatttgctctcgaatacatctactttgataaggactgagattggcatgcataacaacaaaacgatccttgatgttacacgtacggtggagcttttcaagaatgtgcagtcactgaatcacctagctaaaacctaagagatatgctcccctttgcttctctgaacatttagcgcgcacaaacgcagatagatacctgaagcccagaaaggaaccaagagaaacgagccatcaaaggtggcaaacaaaaccacgtgattcaggaacgtcgtctcatagtctatatcaatttgatttttttcccgtaaacacgtaaaagcttaagagatatacttgatagtgcagtgtcaaagagtgtgtggttttaatcttgtggtctcgtgttcaatctttaacacgctcacaatttcttcttagaaaatgtttggaaggacgtccctctccaaatcttgttttctttaacacgtactccctctgtcctataaaaaaccaacctaataccggatatgacacatcctagtactacaaatttggacatacatatgtctagattcatagtactataatatatcatatctggttctagattcattttttatgggaccgagggagtaaaagctctccacgttaatatattagaataagagttcagcatctagctaatgaccatatattctgcactgtgcgtggccatggttccaccatgtgcgcaggtagttgttagttgcgtgcaccgtgcaagaaaaacaaggtagttagttgcttgatgctctcacaaatgtttaatgtaatcgcctaaagaaatcagagcatgcgacactgacatcgaagacaatgccccgttgcaatctctggaattggaatcagaatccaaaggttacaggggttgtaacagcggccacatcttttgattaagaaaccaagaagcacatgc

SEQ ID NO: 6773 - DNA, 2000 bp, Oryza sativa
atcttggtgtagtcgaagggcccgtacgggttgtagttgggcaggtacaccggcgtgtcgccgaacgtcgcgaacaccggcaggcacagggcgaacgtgctgccgaaccggcgctgcgcggcgagctgcgacggcagcgagagcggcgtcgtcccggagaaccccgcgamgccggcggccgcctgcggcagcgacggcgacgccagcagccgctccggcgcgcacgcgccgacggcggtgaacgactccgggtacagcaggtcggtgccgttggtcgtgttcgccgacatggtgaatgtcgtcagatcgccggtggagcactcgccggtgaccggattgaacgggtgggccgtgcaggcgcagcgcgaccccggttcgcggccggcccagaaccagccgccgtcgacgtaccggcagcggcgaggctgctgccggttgaccgcgtcgcacgcggcggactggcatggcaccgtggagtgcgtggacgggcacgtcgaccagacgagcgcgccggcgaggtcgacgacgagcggcggcgcgccgttcttgacggagatggtgtagagtgaggtgttgtaatccttggcgagcctggagactagtggcttctgatcactcgcagcttgtgctgtgcaccggacgaacacttgcactgcgatggcagcaagaagcagcacgtgcacaggttcaggtggacgaggcatgatgcgatgcgttgctctgaacaagcaaaaacgtagcgaatgatcgaggtgattaggatgaagagagacgctgagataagatggtctcttttccgtgtatttgtatagcgatttagcagggttaagcgttgacctatacacgtagtaaatgtcgtgctaatttgatgagatgtatctcaaggtggactgaacataacaaaaccatggatcaaaccaaaacccagctgcaaacagtagatgatcaacactaggaacctaggatctccgctttgattcgtgtgtaaacttcgggctggctggttcagttgaccacaggtacacggttatcctcgtgagtcgtgaccagttaattagcaccatcggcgtagcaaaaccacggcttcgatcgtcagtccgtctcgcctcgcctgtactgtaaaggaaaactattttaaactctaaaaattaggttttgcatgtcactcaaatgggttataaatttttttaaaaaacaataagataacttaatatgtgatagatcaatccacaaacatgcaaggcgaaatttaaccataaaataaaaaaaaataaatttgactataaatatacgttaactagctgtagtttaatttattttttgtgcaacttatataaattgtatttcaacttggaatatttgtgaaatgataccatcatatgttaatacatctttttttttaaattttttttaaccatttgagtggcatgctaagagtcaggacatcttgtctgtaatcaccatgggagcatattagtgtagggatgcaagcgggccgactcgcgaattcactcctaggtcaaataaatgataattccatggggtttttggtgtccgtggcctaaacttgccgcatcttagatatgcaagtgggtcgatttataaacatatttatagatcaagttaatatatataacatgtgagtcaaacctgcggtttatgcactaattttgtctataagcggcttccccacttgcacccttatattagtgtgtaatactgttgatagctcgagcgacataattttgggctccttgggctaaaactctttgggccttagagcagcatatgtttgcttggactaggctgcgtgtgagccgaaggcccagctcgaaagcttgatgggctgtggtggcttcagggcagcggcggcgcagacgatcccgtgagtccagccacggggggcggagcgaagccaccggcggcgaggtggtgaagggggctggaggcggcgtccgttcgagcggcggcggccggatcgatggatcgagtcgagcacc

SEQ ID NO: 6774 - DNA, 2000 bp, Oryza sativa
ttttgtcaatgccaaattttgacaagttttgacatgactaattttggtaaggtaaaattgtatttggattgaagtcaaaatagcataagttcactattgaaatggcctattttcttagacatgctaaaatttgacttcaaaccaaatagacactaaacactattgaaattgccaaatattggtgaggctaatttaggcaacaaaccaaaccagccccttgtggcaacttcaacctcgagacaaattaaactatctcgctctttgtgatcaggatggatgaaccgatcatatatatgcctaacaattctttttattcgcgacgtcaatatactacagttaatttgtctacagttctcattctcgcttgtcgccgtgaccagttggcgctagcttgacgatcttacaatgttgggactgatttgactgaatgaatgaattaattaatgagatgtatcacagtgggctaaataaacagaagtacggattaagtcgtccaggcatcgccattaccttatcaacgctaggaacttaggagtttcgatctacaatccgctttttgataattgatatgtgcaaacttagggctggtcgcgtcagttgacaaatgacaaccggcacgtttgcaacatgcaaggcgggttgaccttatttgatttataaagtgtagcaaattttttcttcaaaaagatcagtgtaccaaaaccacgggtccgcctcgttttcgtctgtacgcgccatgggccacttggcctatgtgggccactcggcctacgaccattttgggcctaagaggaggtgtttaggtgggccgtcggctgaagatctcgtctagttgggggtgagcccaagaggacagaggcggcggcggcgcagatgctctcctcaccccgtgtcggccataagggcggagcgaacacaccggcggcgaggcggtgaaggggttggaggaggcggtcgagcgggttctccctctgcagaacgatggatcgagccgagcaccttgagcccttctatccacaggcggaagtgcagtggctggcggcgcctcgatttcctggtgttggaatcggtaagctctctctctctataaatatgtatatccggttcaacatttgggattgaaacgaattcctctaacacaactcaaaaaattggaaataatctcatcttgcgagttgcgaccctgattcttgccttcttgctggctgttcctcagtcagtcccattccatccggaggagtaattctgaatagtgtgtggtcctcatcctcacgcacgggccgggtaaatccttccaaaatggatgtcttgtaaggcttgaaaaggattcaatctaaggcaagttgttggataagtctccatagtcatttcttcttgttgacagattacccaggtttcaccattgtttggctattgcaaatcattttaattttatcttccaattaatttggactccatcgctttaaccttttctgtaaaatattaaatatgtatcctctccaggaaggccaccacgcaccacctaccaagcgcactatgccatggactaaactatgaattcctttcatcaaaatgctgatacttgcaaatcttaatgctttatcagaatcagtgcattttgcctttagacgatatagcaagcactgaaactgcctactcagcacatcaggtgtcaatgcaaagtgtgcgcactaaaaaattttttgccgggtcggccgaaaggttcggtcgaccaaatttcattaaggaaaacgcactaaaaattttaaaatctatttggtgggcaaatagaataactttgctcatgcaagcgacatgtaggtggagcatgccgtcgcatggaataactttgctcatggtggactgtggtagggtcttccctaaagcaaagagacggagtgcacttgtgggaagagagctttcacaaacaaattggcagcatatactcttgtgggagagatagggagtttgtgctctagctggctggtagcttcgaggcc

SEQ ID NO: 6775 - DNA, 2000 bp, Oryza sativa
ccaattaattaagctgccatggtgagactgtaagagtgaaaagaacgagaactagacaaatgggccaggctacgaatcgaagctatgattcatcaaatagatgctagtcaaggcagaaagatacaggtacatagagaattagatgtcagtcacccatgctgataaagaatgtctccatgttccctatatataggtgtgcaggagcaccaaccgaccgaatgcttattgtccatagaaatcctgatgcgttcaggcaaaaacatatcttgcctcgtaatgtgattggtgtcattggttcaatcaaacagattttgagccttgtttgattccctaacttgctggtcaatctggcgacacatattattggatgccatattcaggtctcagggcttgatcgtagtacaagtaatcacatgcaagctgcacgcagtttcatgtagcatgggcttcaaacttgtagaactacacaacatggcaccggggtccgggaacgacttgacctagctatgttaggcttgtgcatacactactaggctcgttttcatgtcgtcgctagcttgctagctaggccggctattagaccgtgaatcaaggtttaatatgatctattcattatgaaaatttgttattatagtcgtatcaaagattaatttaattacactcttttgacgagcacaacttaatatgtgattagaagctacattttcttttctcccatgtgcaaaagattatcagacttctacaggaaattagggttgggatgggatgaaaccatccttgattttagggttgggatgattccactcgtgtgtttggtttgtagaatagtacgatcccagtttttttcttatttggttgaagggacgagagagggatgggatggacaccgtttgtaaccaccgatgacggccggccgggcgaaggagcgcgactatagcctggcaacaagaaggcggaggagaggcgtgagcaggcaaagcaaccatggccgccgtcgccgcctctgccctgacctccctctccaccaccgcagccgccgccagtggcaagcgcctcctcctctcctcccttggctccctctccctctccttcgcctcctgtggccgcgtcgccgttaggccccgtaggcgggcgtaggagcgcgacgacggacgggcgggcggatccgctgccaccgagtcccccgcctccagatctgccgccgcacccgtccccatcgccgaatccgccgccgccatccccaccacgggatccaccatcgccgaggcccccgctgccaccattgccgagcccgccgccatcgcccgagccgtttgcttcgctcgagcccgccgtctcctaagggcgagtcacgccgttcgctcatcccaggtgggacgagttcatccgccacatttggctggatcggttggtcccggatctgagagaaatattcttctccaggggactaacccatcccactcacctctaaactaaacacctctaaaagtgggttcgttccaacccatcccacccttgcaaccaaacactaaggagctaagcatgcatcatgcatcaatgagacaaacagtatagcttagccacctaacaaaatcagtatctcctgccttttcactggacaaaatgacaatcggccgttacttttggggtcacatggactctgattaataattaatcgaaaattgtgcaagggcataaagtaatgcgtgttagtcacttgtcgcattcgaatatcgttaaaaggtcgcattactgatagcaccatttttatatgcaatatgcttatcatcatcccatacttgatcagactaagcaaactaactgttaaacttcctgtataaatatgcatggagaccaccatgcttcacactccactccacactggcacactgcccatatccatctattctgaatagagcctctgcattgagttaagaactaatccgtttgactaattctgtttttgcacacaagtcgccataatcaccatgacaatggcc

SEQ ID NO: 6776 - DNA, 2000 bp, Oryza sativa
ttctacatggtggggcggtacgacgacgagggggacaccttctcgccggaggagcctgaccgcgggaaaaaatgcccgaaatggcgctgcctcaaatacggccaggctaacgccgccaagtcgttcttcgaacgcgcgcaggaatccgcgtttgcagtggctgtgggtcaacgagtacgacagcaaggccgacgacgtcgccaagggctgggccggcgtccaggtcacctcccgcttcgccaccatgcacgccggcgacgtcgccatcgatctgattcggcgacgaactgaatatcttgagctgccgtgcaggcgttcccgaggaaggtgtggctggacggcgacgggaagcagctgctgcagtggcccgtcgacgagatcgagacgctaaggacgaagcgtgtcgggctgcagggcacggaggtgaaggccggcggcctgcacgagatcgtcggcgtcgcgagctcccaggccgacgtcgaggtggtgttcgagatcccgaacctggaggacgaggccgagagcttcgatcccgactggctggatccccacaagctgtgcaaggacaagggcgccgcctccgcgcacggcggcgtcggcccgttcgggctcatcgtcatggcctccggcgacctgcaggagcaaaccgccgtcttcttcagagtgttcaaacaccatggaaagtacaaggtcttcatgtgcactgacctcacaaggtaattgaaagttgaaactcctccaagccaattaaaacttaaaatttgtgacccaaacgattaccaatttttgcacaattttcgctgaaattgcatacttgtaggtcatcgacaaaagcagatgtgtacaaggacgcttacggaggattcgttgatgtggacatacagaaggacaagagcatatcactcagaacactggtaaaattctgtcactaaaatcttagttcttcagtacgtaaaccatgcgcatgaactgaaatcgaacgaaaattcagattgaccactcgatgattgagagcttcggaggcggtggccgagcgtgcatcacaacccgggtataccctgagcacgcagcaacaagcagcagtcacctgtacgtgttcaacaatgggtcaggcacggtgaatgtgtccaagctcgaggcgtgggagatggccacggcgaccgtgaactctgcagatgcattggacgcaataacgcgtagctgaaacgtcttagtatgcatggcttggctaattcgatcaatggttactgtgctgtggccgatcgattttatcatttatcattcatcagtcacacgaccttcaaggccatagcctgcctgtctggaggtttattgccttattcccaggataaaataaaggttgtatgttacaaatgtttgatcggttctcaagttcacacagtgatggatgttgctattgcagattatattactcttaagtttttaaacgaaccgacactaacaccaatttcattgaatatagtaggagagaggatacttacccgtaaaaacaggaaaaagatgttatatacagagttttttccgtaggcttaccactctatttataaggataagccaagcgaagaattgttaatctttcatttggctctgaaaattctaatcacctgcaaaagaagccgcttgatcgatcgagtgcagcagaggcaaatggatctcttgtgaattgtgacagccaaggtttagtcaaaagacaatggtggtaggttgatgcaccgaagtaaacaaatattgaattactcagcagagctgatctgattagcaccgatcacaggttggtccgcatgcttacgtacaaatatcgtcgcattttatatgacctaatggtcatcagcgattaagaaaacattagtgcgcacatggtggcaggtgcttaattaacatgtattaaactcggagacttgtaagtcttctcaaatttgcaaactctactgttttgtttgatagttttgctagctgctgcttcactctactgttcggcc

SEQ ID NO: 6777 - DNA, 2000 bp, Oryza sativa
gaggtcaaggagtttccttggcgaggcgacgacatgctcgctggtgccgccggttcagatatcctcctcctgaggtctagcggcggtgggccgagctcccatagatgagggatcgagctcgagggcggcgggtcaagataggtggctggtgggtaacttgtcgctaggttgggggcagagggaggacggctgcgccactcatcggtttgcctcaggagattcaaagaacgtggacctctgcagagatccgtggctcttcacaagggtacactgctgcacgaacgtgaagccgaaattccttgttggtgccgtggggccgaatgacacatcagcccactatgaatgacctaagggtgttcacagtgtgtcatcctcatatgaggagcctcagagtactacgttgtctagggctatggttctaaaatttgaattctttacgacgcaagtggcattacaagtggctttaattttatatattagcccgtaaaacttttgtttcagttctcatattttctataatttgtctggaggtcaaaaatttacaataaaatccccyatcccccttctctcccttatcctcacgccactcctctcctcacgctggcgacccgcccgacgcctctcctcccctaacccctggccaatgcctgccatctcctcccccgaccagcgcctctcctccccctgccagtccccacgttgttggcagcagaggacattgaggcgggtcttggtggcagcatccatggagtggcctcagcggtgggcgtggatcaaggatagcgtagccatcgagctcccagtggagcggatcgaggctggcctcatcggtgagcgcaaatcaaggctagggacggctagcgagcaagccgatgttggcttccccaacccctctgttgggtttccctccccttcccatgacaacctcgaggctagtcatggagcttaggcggcaactagatcagggcgtcgcggccatgctatcctgcttgttatgagtgtcctccgccgacagcctccagatcaaggcggcggttgtcgagcattccggaggagtgggagatggcgacgagccccgcgatggcacagagcaggagctgcgtccttcttggcatggagagagggacgacagcaagctcctcagcatgacacggaaaggggacacgaaagatgggggatggtgggctcccctccatccgctccgtccgccgagacgagatccctttcctctgtcacctttctcccctccgtctctttctccctctccgtttctaggcgacgcaggcaacgacgacatgcacgaaaccacacactctctctccccatgccaccaatcttcgaacgggctgaagaacgggtgaccatctttggtcacgcgttcctcaacttggtgggcccacccactaacgtggcaccaaatcacacagaaaagctagccgacgtggagagcttgggccgaatgacagcacgatatacagtgaacgccctaagaagggtcatcgtgacctttctaagatcttgcgtcaacttctggcttacaaaagcagaaaggcatcactcacaataattctttagggcccgatgtagcacacttcccataccctttgcccctgtaccaaacaaatctgcccacgggacgaaatccaagagatgccacaaataaaataacctacccatcgccattgttccttgtgtactccttgagtaaccccctcctactcccagccagcacatttcttgggggtgaaaggacgmaatcctagctagctgctgctacatttgccaactgccaactgtgcgcccaaagtccccacccatgttataaatactaccatatcttcgggtccaattcagcatccaacaaagtcattccctccgccattaataacagccagaaagagtgtagtaaaggtgtgtgcacaaagcagcagtaaagagcacaggcaggctggaacaagcaggagagcgatcgatccagtaggcaggcagtggcaatagca

SEQ ID NO: 6778 - DNA, 2000 bp, Oryza sativa
gaagatgtttgtgtgtgacatgaatttagtgcctcttttgggatggatgtttttttttcttgaagaactttcacgagaattacattaacgtagtacaaaattaaaaccattgcattgctaaggagcgccattcttacaaagttcttaactatttaatttatagtaaattgtactttgtaccacatattcttaccaaggtttcacttaatttggtatccttaaagtgattttttcactttagactagatattgctgccaagtgtcgcgcgttggacaggatggcccaaatgtcaatgagactaatcatcttgattgccgtgtgttacttacatgtaggttacctgttccaaattacactacctggcaacaatacccagttcaaagtgggaatatcactgtaatggtagtacagagtgaaattttaataagaatattcatatatatggtccaaaatgtaatttactctttattaaaagttggaagctagtgacaattgtagtaaatgatgtgtaaaatgatttctaagaaaattttgtaggtaggaaagacgagccgtgagcgtagctcaactagaaggtccagctatagacttggtaagtgtcttgaatttctgattaattattttttactgctaaacgagatatttgtcgacagcaagatgtgtatggcgacttcatcaatttataagatatgatggcctaattttttaaggtgctcatattcgtacatgtgtacgagcatctacatttataatgtgttttgaaattcttctgtgcatctgtaagtagtactttttaccggctttgatatgggtacataaaaggcaaattttaatacaagacatctaaaaatttatggaattggatgatagacattgaaaaagtatcacagctaaaaagtatcatacaaaactggtaatttgctaaacaatactttcggttaaattggagagataaattcttaagaaagacgagaatatctctagaaccacatgcttcaaacatagtgctagagtacaaattttaaaattatgtaactctaaatttatcatcaccccaagcatatcatttgaaaaaataatatttcatcttcacttcggactcagcttaaaaacttttgacactaagagcataaaataatatttcatcttcacttcagtctcagctcaaaaacttttgacactgagagcattcttgtaatttttgaagaatttctctcttttcaattaagctgaaagtgttcttcaacaaattattagtttgtagggtgttttcaatcgtgaaacgttttaatgatatctactagtaacaaattataaaaattttacatgtccaaattttacctacataaaacaagtattatggtccagcaccagcaggctacaccttcctggactggacctgcctagagatccattaatccttccacgggatattaaacacggcgtaaacccggtccacaccgccccgcacgatccccccacctctcatccatatccatccacccgcccgaacgaccaccaatccaccattacaccacttaactcctctccctacaccaccaagtccatgcaccaaaccccatcccagccgtccatctcctacgtgagagctccaccgccaccggccagtcggccacacaccacacgaatctcgaggcacaaccccacgccgcacacaatctgagccgctcgtaaagtcaacggtcaaccccgccgcacggatcttacagcgcgcgtgttcgttcgaacgattctcttcttcctcttccccctctccctccttcctcaaccacgtcgccgacgaccaccaccacccaccaaatcacgcatctccccactccattgccaccgcctcacgcttctacccctctagaaccttccagaacaatccagtatcccctctcctcgcctcctcgagatcgcgcggagagggaggcggcgtcgtcgcttgatctgtcaggaggaggaggaggaggagggtagtgtgaaatcgggggat

SEQ ID NO: 6779 - DNA, 2000 bp, Oryza sativa
gccgtacacgctaaacaaatactcagtactactactaattattatactcagcgtcccaaaatataacttctatgcttcaaattttatctcgaaattacactctcctcccaatcaatcacaacctttcaatttcaccattttwataatcccgtatttaacaaacattttatattttagaatgaaggtagttgtataatattagtaataaataaactattcttttttaaaaaaatacaggacgcaatttgataatgtaaagcgtaaatgcacacttaactagcacaactctactaaattcctttcaaaattctacaccatgagatctctggttctatttagtgtctgtattgtatttttttaagtatgatatgatctaaacggtaaggtaataataataacttttactacctccattttaaattagtagtcgctttcacttttttcttataacgtttgaccattcgtcttatataaaaaattagtgcaaatataaaaatwgagaagtcatacttaaagtgcttttaataataaagcaaatcataaacaaaacaaatattaattcgagtaaattgcacccacagtataacaacttgataggtgggtgcgatatagtgcaagaacttgagaattgaacgttcgagtgcaacaacttgacaagtgggcgcgttttagtacaagaacttgacaatttagtattttagtgcatcaactaagctaagcatatgctaggtgagtttttctcacgatatcaatatgccattacatagcaatcatacggatattaccttgtaatattgaattttatctttaagaattatactgcatatccaatttacaaccaattacctttaagaatttttgttttcttcacattcctaaatctcaaccgaaatataataatttctacatctagttaattgacttttagttattagttattagaataaaaatataaatatgcttatatgcaaatccacgctagtatattgtcaaaataagaacttaaaaattgaatatgtataaaaagtgctccaaataattaagttgtcgcataacttcttatcttattgtatcaaaatcgtacgtatcttacaagttgttgcatttatacaatcacttataaaattttttagctaaactgcacatacctgcgaagttgatgcactagaatgctcgtttctcaagttcttgcaccaaattgcacccacctactaagttgatacatcatgggtgtaatttactctattaattctataatttttgaataagacgaaagattaaaagttaaaaaaaactcaaagcgacaagtattgtaggacggagaaagtatttatttttacgcgtcttgtagttaagtacagtatatttttaggtagagggatgaataatctccctggttgagaggtggagagagaaggatggtacccattgaaaaatgaagaattccaataccacttgcaggtaggttgttgctcgttttaattcctactgccctcttgctgctcaccaaactgctactctctcctctcccaccatttsgtcaccctgcctcctcckgtctsygcctctgctcggctagtctagtgtactactctatcttctcctcctctctttctcctacccaaatccatccacccaacatcttttttctcagccgtcgtctcatctcgcctttcgtagcgttgcgtcgcgccgcgtctaccctttccaggtgagcctccccgattaacatcgctcgttctagctagctaagctagctagctcctgtgttcttgctgtttctttgtttctttttgcgtttttaattttcctttcttggatctttctttgctagctcgttttgatttgtgtgcttctgtatttgtgtgttttgtgggcgaaaggggggctttcttggttcttgttccgggcgattgttattcttgttctggagaatcggattacgagtgtgccttgcagtggagttttgtaatgttaggctccaattgagcaagaaaaag

SEQ ID NO: 6780 - DNA, 2000 bp, Oryza sativa
ccaaaaaaaaatcgtaagcacatataagtaaagactcttatcgggttgcatgcctagaagtagcagggatatgaaaattagagtttaatcctattgaacttagtagatttgtaggttgcatttggacatttcttttgttaattcggtcttttcggttaacgaggagactaaccgaattgatcaaataaaattcggtctttcactacctcggaccgaatttttcggtctcggtcttttaagttcggtctttttttcccactcctagacgaggagcatgatgacttcaccaaccacattgttgcctccagatctaacagcttcattggccttctctttccatcaccttcgacaatacgcctaagaagaggagcacatgccggtcggcatcctcctcgacagcctctcttttacctagttgccccttctagtgggcgctgacatgtcttagagcatgagacaaagaaagaggccacaagactgaagctgtccaccgctcttgccgctagatccagaggagtagcaggggaggcctaggcctaggctaaaaaacctgcttgcccgccccgcttgtatccctactagaaatggcactagtagcccgcttcatgttgccaaacctgtccgtggagaagattcctcacagctagaagaaagaagaggaacatgagttattgggagggaaaaggagctaggggaaggaggagatggggagcatagcatgagaggagaaagagaggagtatgtggggaaagataagagtgaatgaaggaggaatagggagccgcgaaagaaaggataagtatcctgtaagttgatgcttagacaggatgtcgtgcatggtctaaaaaaaaaaagacaggatgtcgtgcagtagtacttcacagatagcttagcagcgttttgctttgtttttcgggggcagcgatcatcggaccgttgtcccgtctagacagtatattgtcgataatgtaaactctgtacatttctctctcctggatacaatctggtttggccgacccggcaaaaatgatttacctaggctgtgtttaattagtgtgccaatttttttttaattatacggacacatatttgaaatattaaacgtagactaataacaaaaacaattacagattccgcatgtaaactgcgagacaaatttattaagcctaattaatccatcattagcaatgtttactgtagcatcacattgtcaaatcatggcgtaattaggctcaagattcgtctcgcaatttatagtcggactgtgcaattggtttttttcatccacatttgatgctccatacatatgtcaaaacatttgatgtgacgaaaaagttaatagtttaaagaaaaaagttaaaatctaaacacggtcctagttagaagtactgcccaattctctcgacagcaatcttacaacatttcactcgaagcatttactgctcaaaataagctcgcaaacatcctcttctgcgatgtcaacacgcgcatttcactgaggacaaacccccattgtcaaaaccattagtttatgaactgaaagcagttccggaaggatcccatcaattggcttttaaataagctacagaaacctcctgcacaaatcagtttcttcaggaaagaaggcaactgctttgaaacttacataaacaactgctactctctcaaagtctcaattgatctaacgaaagattgcttgcatctgtgcaagtaactattgcctattgcttagtgctgtagtactgtcagtagcttgcagaaatgcagagctgcataatggtgcactgcatggctatggacacatcatttgaccttcaagggttccaaaaatacaactgaaatagagtaaaataacacctatggcactacattatttcacgcgtaaagtttaaattaagctagccttactgtttgaattcctcaagcccctagccttataagagtgtaaggccttgggaggcaaagtctttcacaaacattccacagccacagcactggta

SEQ ID NO: 6781 - DNA, 2000 bp, Oryza sativa
actagcttcttccaaacgaggattttataagcgttgctactccagtgatcttcactttattcatgctatcgtcctgtcctgcatcttttacagtttgtagattctttttggataaatattgatactggatggtccttgagacttcaaggaacagcatctggcagtcgaatgtcaactgaatctaacaattcccgactattttaattgtttgtcagaatatacacttggcatcgcaaggaagtcccatgcattgatttgctttgcagcaggaagtcccatgcactgatttgctttgctgcactgctgcgtccataaattacaataccatatgagattattttcagaaatgtcattcttgaaggaatctctcgtgtactttttaaaagatcaaaattgctactgacatactgcacacagcaacaggcaatgaccaatggctctatagcgttcttttataagaggagctgactaggtaaattgtatactacctcgtcccctaatataagagatattcactatatttttttaacgtttgaccactcgtcttattttaaaaaaagttgtgcaaatatcaaaaacgaaaagttctgcttaaaatactttgaataataaagtaagtcacaaataaaatgaataataattctaaatttttttaattaagacgagtagtcaaacagtgcaagcaaaatgtcaaaatcgcttatattaggggacggagggagtacacagtagtagtaaagttgatcggcaacgcccggagcacatagctctacaaataaaatcttccgatctcgctttctattaaatacttgttcatactttattcttaaattttgaatactcccttttataataatttgtaaatacctaaacaaaggccatattatcatagtgcggtgtatcataaacataaccatatattctctccatcctaaaatataaatataataacttctaataatatatttggataaagatatgttgagatacatagttaaaatttactacttcctccgttccacaatgtaagattttctagcattgtctaaattcataaagatgttaatgaatctagacacatatacaaaacatatacattgatcaatggatatatctaggtaagactaaaaagtcttacaatatgaaacggggggagtgtattttaggatggagatagtaactttcatttgtcataatataatcatttcaaaataattgaccactaacagaactaaggctgtgtttagatctagaggtaaaaagttttagcgtgtcacatcgaatatacggacacacatttaaagtattaaacgtatactaataacaaaacaaattacagattccgcccgtaaactacgagacgaatttattaagcctaattaatccgtcattagcaaatgtttacttagcactgtattgtcaaatcatgtagcaattaagcttaaaagattcatctcgcaatttacacgcaatctgtgtaattaatttttttttgtctatatttaatactccatacatgtgtctaaacatttgatgtgatatgatgaaaaatttttgcgtggtaactaaacagggcctaagtactatttgaaaactcagagagtaatgcacatgcaacataccaggagcaagcaagcaagccagaggagttgaagattcaaaacctacaaccatgtcaattgtaaaaggcgagtccttgacttacacaacatgccagctcattcttcccgcgtctgcaacttgcaacccagatttttcttgaattcccaaagtcgtcaccttaacacggagctatccagaaacatatctttttatacttacaaacagaacgtttagcttcttaccaaagaaatagcagtagatagccagaaggaaggttaaattttcaattcagagacaaagaatactataatgcaatttgaccaaagcagaacaatgaaaattcagtgctataagactgcatagcaccatacattcagtaaccagtagaaccatccggg

SEQ ID NO: 6782 - DNA, 2000 bp, Oryza sativa
aawttttttttaacttgactgaaaaactgtaaagttgagcagagctggtccgagaggtctggttctcctagagggattgtaaaccctggttgttgcactgctcatgtataggcattctttttttttttaagataatagaagctttatttagactcagttaattacatcaagagcaaagctccggcgaggacgaggacgagaacaaggcccggtaagcagcaaagctgtaagctcgggaagctatactagttgctaatgctaccggacatttccttcgacaggtgacaacccccctgtgagaactagcattgcctgacccattaattgggaagaatagccatttagatcgcctgcagctgccagtgccaggagaagcatacctgacggaggcgaagcarggaatcggagtgaagaaggcagtgccactgcagcagacgatcgttagcgatcagtccattacctgcaaagtcgaaatggacgacatttgatcaggatatgcttctctcatctagtgttattctttaactcttttttcagtgtattaaaaaaattcaggggaggaaaagaaaatgcttgaagtttccttgaaacttcccaaaagaaaaggacagacatgatcttttagttcaaaattgagggcgcgttcttaacagctataataggttgttcatcacacaccaccaaagattacgattttactaaaaacttcccacatcagcaatgttgagataactctctaagctatttgatagctttataacattcagttaatccataggagaaattttcctctgtccataatctacccaatcatgcagttatagaatgttcccttagaatgttataacaacagcttgtcaacaattcccttgagtcaacccttataccctggcctaaccttccttagtgtgggttgtaacctcttgaatcttggtgtataaaggagagcaacctttgaaccaatcaaaatctaggtcagacaaagatattgtaagtgttgctactccagtactaacctttgaaccaagcaaaatccaggtcagacaaaggttttgtatgtgttgctcctccagtgcttaccacttattcttggtagtgtacgtcctgcaccttacaatattgttcatcttaattcgtcaatcaacatctcaataagtttttaattttttttatggaccaaattgattggattggattggatggtccttgaagcttcaacgaacagaagctcaattgaatgtcaaccaaatctgattgttgaatgtcaaccacatctgccaattctggactcttgtgatcagagaaaatcccattgagttgacttgccattacaaacagtataatcagtgatgtacccataaattacgataccaggagaatatttttagacctaccatatgcactcttcaaggaatatcccataccattttaaaagaagctatcattctgtttataaatataaatgatttttcctaatagctccctgttcaggtatgtctggaaaatacaaggaaattctagcttgcaaacgtaggaaaaatgagctggacatacacaccttcctcaagtggtctttgggccttacgaaatggtgtgttgtgacaacgtatttaatgcctgaggttctgaattttgactctcctggtataatacgttgtgtttttaaatatttataaacaaatttattactaaaaggtgagtaatcaaagtttgaagaatagtaatttctggtgacaagtatagggaaacagagatggtaagatttcatttgcaaagcccatgcactcttctaggcgttgccgatcaccttactattgtttatataatcttgccagttcctttcaatcctatgaacagcaagaaggaagcttataattttaattcagagacaacagagcctataatgcaatctgaccaagtcaaagaaatgaaaaatcagtgctataagactgcatggcaccatacattcagtaaccagcagagcagaccacaggataggg

SEQ ID NO: 6783 - DNA, 2000 bp, Oryza sativa
agaatagcagcgggctacagatttgtagccaactgtagcacggactccaagacgcagtgtgtgtatgacaggtgggactagatattaataatgtagtatataactattgtatgaatgagctattagattgrctatagatgaattggagttagtagttggctacactattaaacttgctcttagagcaagtttaatagtatagctcactattggctccacttcatctatagccaatccatacaatagttgcttactatactatcaatatatggtcccatctattatacacacattgcgtcttggagtccgtgctgcagctggctacagatctgtagcccactgctcttctctcttatcttttatctcattaaaatatgtttgcagctggttaatagtctttctattgtacctgctattacttcttattaaggttccaactaattaaattgtagtactcctactgtagtggagtaccatattactatatcttaacataccgtgcctaggagataagtgaacaataatgatcgatccccatgtgctcaaaatcaaaatcatgacctaacttcgcgtgaggttttgataaactaattaatattaaccagacctaagcagtgtccactgtatatgtatatgtagatgctggtagattttctctcccatctctacttttttttacttggcttaaataggataatctagtacttattaagcaatacaattcaaatctatttaattatagactcctattctttgggtattttatacttgataatttgctaaagtagctttacggattcatctatttaaacacgatacatgatgtgcgaatttatcatagaattcaaatatattccaactacttttttcaaattaaatttctaaggtatgcagtgtaatagaatcagattcattggataggaagcaatgaatgactcataatcatttgaaagtaaggaaaaaaagagagacgagtccattttacatgtcaactttcgtcaaaataaaaattcatccctaaacttcaaaattggatactatttatcccttagtttttaataccgttttcttttgaaaagtatgtacatcattttttttatattttttctcaatcatttactaacttttataattaatatatattttaacctatttgaatcggtcaaaagatgaaaagtaaatggttgagggatgaataatgtctggttttgaagtttatgaataaatgttagacttgatgaaaattggagatgtaaagggatttttctattaaaagaatatgcgattttgacatgtacaaatggataagctcaggccggcacgtccattgcggtttcaccagagccaatccatcttgcaagattccaatgaaatagaggcatacatggaatatattctggagactgtgaagatttgaagatgttacagataagatgatttgaactatataattccagctacgtaaaaaagctaagacaatgattatatatgagatggtagcatatgtgaaatggtttagtgaatacttaaaactttatttaggtgtttggttagggagagagagagtggcgataattataagggacaattgtttatttgactttgttttgaagcctaactaccaatttgaatctattttttctagtttgcttatttgcctgcttttcgaaaatgaacactccgtctgacctgtttctacaacaccgttaagagttcattttaaaaaagagggaaaattaaaatcacatttcataatgactaaaataccctccaactctatcctcatctaacccttttctctcccggtctctctctctctatcatatcccttctctctccggcgagggagctgtggcggggaaggtaagcggcagagccggctggtggagggagggaccaccggcggcagcggcgggccatggagggaggggatccacgccggcgccaacttgcggagggagggcggctatgccggcgtggatcagcggcagcgccggctg

SEQ ID NO: 6784 - DNA, 1434 bp, Oryza sativa
ccctttttgggggsccccccgggaagggggggggtcggaatagaatgtgtgacgtcgttctcacagatcaagacgatgtcatttctgtacatcaaaggtcctttttaatccacattgcgtgggttactcagctaatggaacatcatcatgttcctggaggaagtgtgcaaatcaagctgataattagcagatcatagctgcctagtggtaacattttctgaagaaacagagcaactctttgatgaggcgaaacgctgatgggtacagacgtacagtacacacaacgacaccaattatacgtgcctccttttcggatgcctactactacttgtaattgtcaatccagaattgtgacgccggtaggagtacgtgttagagaagagtagctgggcctcgccgtctgcaataatacaaacctgctccgggacgcacgacgaacctacgaacaactcaccattcttggccgcatttgcctttccagaggggcagcagcacacagaagctaccatccgctgcatcgagtgtcgcgtcggctaatcggagtgtacagttgtgcacgaaactgcaatgtgcgctttgaccggtgctggccggctacattgcgtggtacatgtgccttcatcatcagttcatcacatgcgtatcttcagcctcgttaatttccatgttactagtatttcaaagttcagatcaagtgctcctagagcttgcattttaaacaggttaccagatcagtcccaatgtacaaaacagtacgcttaaatttaaccgtaaatctacacaaaaatagctctaatcacacacgaaatctaactaaactcgctgcaattaagagctgccgctgctcgtgccgttcttgctgctgctgctgcctgcaggaaccggaagtttttaatgcgcggagcatatgcagctacgcaccaaccgcgccatgtgcggggcggggcggccgtgcttacacatgttggcaacgcacgcgacgcgacgcgagcgcccctccccggacagccgtatccctccccgtctaccacacgcccgtggccgcgaccgcgagagcccaagccgcccccggatagaacacgcgcatgtgggcgagacgtgggggccagcacgtcgcttctagatccccctctccgctcgccgcggccgtggtccgtggacatggcatgcatccaccgcaccgcgccgcgccgcgcacgcacgcatctcggcgcgcgccgccacgctaactaccccgggcgacgcgagtcagtccatcccctcaccttcccccactccgaggagacttggagtctacatcactcgaccataactacgctaccagccactgcgcacgcacgactcgcacacgctcctcgtcccttcttctaccgcggccgcgcgctgtgtcagtagtgcgtgttggtttgggagagctagcgcggccggcacagc

SEQ ID NO: 6785 - DNA, 2000 bp, Oryza sativa
cctgttacattcctctgcttcgtgcaaaaacggatcgcaaacaaaacgaacaattcgaacaacacttgtgtatcctagagaggaacgtacatcgacattgctcagatacatgcaccaaccaacaagtcagagtttttcaatctgtttatcaaccttattgcattttggtaaaaaaaaagacacacaactaacccgagctctttatgggtgcttgtgtggatgagttagtcagtacttcttccgcaccgagtgccagatgagctttatctggtaccacaaaggagatatcccatgaactccccttgacaaccgtgaatcaaagacgttgaattcacggcgtcgtaaggagtccagaaggacctgggctggtacccctgggaggagtacagggattgcttccgctggcacagaagaggccagctcccgcgccttctgcaggtgagcatcagcaacagatgcaaccttgaaaactgcatctgggagctcatctcccatcctgacctctgatcggccaccttcccgtgtaagcagaccgcactcctcagctatacttgctgggatatacggtatcctcccttgcttactcacatggtgaggcaaagccttgagtagcagtagcagcccactagctttgcctatgtgtgaggcggcatgatcagcgatagttgactgtatcccaccagcttgcaacgtcatgtaaaggatggtagattgggtgtcctctgcatacctctccaattcagaaattgtctcaggaatggcataatcatcccggtttgcatcgtttatccttgcctccacagacctcttgagccaatgcttgctaatcttgtgctcggacacaacagaagagagcacctgggcaacagggtgctcaaccagcttgtttgcaaagaccttgtcgactacatctttccaccagaggaggcgcataaggccagtcttagggtccgagacaacatccatggcctttgccgtctcaatgttgaaggctcggaaggcgaatgcagccttgcgcatagctggaggtaggtggagaaggcagagatagtggtgataatcatagttgcgaacttgctgcacacagtacgagagggcggttcgcaggttaccacccgctgcagctgtactacccatgaactctgtttgagatgtgaaagaggaggtcctgcaatggagatgaaagcagacatttaggtacattccaatagtttttttaaccgaaatcacttattacaattccctactatgcataagtaatgtaaatgataaatactagagaaataatagatagaacgtacacttggtgagactacaaacaaagaaaaaaaatgtacaaaaaaaccatggtctccctctgtgcattgcatgaattccagattagaacaagcatcttttgtagaagaacaagtgcaggtgaagtgttggtatgatacttgtagcacaaatagagaaaagcaggagacacagaacaaatagtagctatagaatgtgcatccattatgctatgaatttatcccttccccattatttgggatatcactatttttgttttcatttgccacgtcataaaatcacaggaattgtattttttttgttctctcttcatcctactcaattattgcggagagaagtatgtagcaggggagtagatgaatagaagaaaagtagcgatggttgtgatatataggaaatatagaaggaatcattagatagttgagaaagatggtgccgtaatgtgagcgagagagttgtggctggctgctatggcaattagcagcaactagcaagggctgaatctaagaaaattagtactccctccagtagccttgttattgtgcggtgcagaaagtaacagatgaactaggggttgaagccatagccatagaatagatagattaagagggaggaggggaattcgtactcagtagtttccgggctttatgagtgaaggaggttgttgccggaccggacttgagtaggaggaggcgcaggcggtc

SEQ ID NO: 6786 - DNA, 2000 bp, Oryza sativa
actcaggtcattgctgtcatgggccgccaccctcttctgtccaaactcccaggccgccgctgcacctagggccgttgctgcatacggaaccacctccgttggatcttaggccgtcaccgtcctttgccacactcgtcgccgctcgaagggatgctgccgccgatgccacaccgctacctgccactgtcccaaccacctccgctgctgtcaccaacccgctcggccaggcgcgggcctaaccaccaccgctacgcctcagccgcccacatccctaccatctcctacaccgccagatctagaggcaggaacctagacccgatgccctcctccccctccgtcgcatagggagcaaggtccctgtcaaggaactgccatgccgccgccttccacgtagccgctcggcatgccgggcggcctgcttgggcgacggcaaggcagtggagagatgcatgccgagtggcctgcttcggcgacggcaaggcagtggagagatgcatgccgagcggcctgcttcggcgacggcaaggcagtggagagatgagacaattatgttggtgtagtgttagatccattttcatttttaggagttaatgtttactcaattttcatttttaggagttaatgtttacttagtccttagatggaggaaatttttgacacctgaaaatctaactacttatccaaaagtagaattttagggatggacttttagattgtgctgatgacttataaaatatatgtaggattgcctatttcgtagtttttttttaaagaaattgattggattcaatccccttgtttcaaagacttactaaacaatttcttccacaggattgaaatttttcaaattttttgtatttttttatacaaatcaaaggggcttcagactttggattttagggccatgacagaaacgcatgccttgtttagttcgtgaaaaaaaaaattttgggtgtcacattggacgtttgaccggatgtcggaaggggttttcggacacgaatgaaaaatttaatttcataactcgcctggaaaccgcgagatgaatttattaagcctaattaatccgccattagcacgtgtgggttactgtagcatttatagctaatcatagactaattaggcttaaaagatttgtctcgcgattttcatacaaactgtacaattagtttttcattttacctatatttaatgcctatacatatgtccaaagatttggtgtgacgtttttgggaaaaaaaattaggaaagtacatcccgctcatggcactactgctacgacttcatttatcctatctagaagggataaagctccagttttacattagaggaacgtcgtcactaacgtgtgggcctttaaaggtgagccctacctatcagcgacccacgttcctttaactttgcatcagaggagctccgtccatctataagtagtccatgctacttaaagcagatgaagaattttagtgaactgaaagtgttacacgtcatgtaaacgaattcttataatcataagtaacaccgaggcgccggtttgccggaaatgctcggcatccgcttcacacacacaaacaaaaagaaaaaggraaaagaagaaagaaaaatcagataacaaagctactccctccatgtcccataatataagggattttggcttttttacttataacattttaccattcgtcttattcaaaatttttttgcaaatataaaaaacgaaaaattgtgcttaagatactgtagataataaagtaagtcacaaataaaataaataataattttaaaaaaatttaaataggacaagtggtcaaacgatataagtaaaaacttaaaatcccttatattatgggacggagggagtactacaaaagagatcgtctcacaaagtgacaaatccacactcggatatctccaaggctgcagctgcctgcagctcaccacactccaccagttgtccagttcaccaccaaagctgtggtcgatcccctccacacgaagat

SEQ ID NO: 6787 - DNA, 2000 bp, Oryza sativa
tctgatacctataaataccggatccgataactaggtatcgcgtctgatacctgtgagtwccagattggatacccgggtatcgggtatctgatctgatacctatgagtatttgttccaatacctatgcgtaacgggtcggatacccaggtaccgagtatgatacttatgaataycaagtctgatacctaagtatcgggyctgatacctatgagtaycggattcgatacctaggtcaggtttgatacctatgagtaccgaatccggtatcgcgtatgatacctatgagtatcggattrgatacccgggtatcgggtatctgatctgrtacctatgagtatcagttcygatacctgtacgtaccgggtcgsatacccaggtacygagtatgatacctatgaataccaagtctaatayctaggtattgggtctgatacctataagtaccggattcgatacctaggttrggtttaatacctatgaataycggatccaatacctagataccgggttgatacatcttagtagcggatctgataccaaatatagggtgtgatgtcacgagacttcagatgtgataccactaattctgatatttatgggttatatactcctattcaacaatcaaataaaaagatggaccatgcatagctaggccagaaagtacagccaaacttgctcatgtgctgctgacatgctttgtttaggctcatgctactagctctagtgcttaattctaactttgctagttgaagcaggtgtcagatccatatggacctaaagaggtgtagaagtagtgctgtactagagtatttcatagctattttgtaatgtaggagaaaagagacctctcgtcagtcgtcactagtcagcagccgtcatgtgaaaggacagtacatgacacgcttttagagagaaaaagaatcggtgagtgattggtaagtataaattataaactataccgttgagacggtataccgtcctatagtttttatcgtattttaatgtatgacgccgttgactttttggccaacgtttgaccattcgttttattcaaaaattttgtgcaaatatgaaaacatttatgtcatgcttaaagaacatttgatgatgaatcaagtcacaataaaataaatgataattacataatttttttaaataagacgaatggtcaaacgttgcataaaaaatcaacgacgttatacattaaaatagtacttcatccgtttcacaatataaatcattctagcatttcccacatttatattgatgttaatgaatctagatatatatctatctagattcattaacatcaatataaatgtgggaaatactaaaatgacttacattataaaaaggaggagtattagtggtagcactattaacgtcaggtttaaaaggacagtagtcaatcgtgccagtctgactcgaatcgtcggtcgttctgacagcagatattttttttaaaaaagtacaagttgtagacttggagagaagattcgccaggttgagcgaaaacctgagacggtttacgtgccagggttggcttcgtgatcccctcgtccagaaaggcaatggaatatactctactgctcctacgcgcacgccccaacccatcggcgaattcggccttgcgatgtgatgcccagtattgcgggcgagcgcgcagctgaaatactgaatcctgaagaatggacgaacagtgagtcgacaaggcgacggcactccgtttcgcgcggtcgcagctgcgcctcccccacccctcacctgctgaccaacctacgctagctatcttcctcttgtcgtcctcctcctccgtcgcatggcggcgcgcggtttctgcaggtataaatagcggccgtgtccagacacgctagtctcacaccaacatacggagttcgagtgacatacgagcagcagccaacacaagctcgatcgaaagttctctcacaagttcagagtagcatttggttagtgacagtaactggtcagcgtctctcacc

SEQ ID NO: 6788 - DNA, 2000 bp, Oryza sativa
caaaagttttctatatgaaagttgctttaaaaaatcatattaatccatttttcaagttttttaggctaatactaattaatctcactataattgcatactttgttttccgtgttgggaggcaagttccyaactttgtctccccgaacacagccttagacgatatagacgttgaaggagatggtcatgaagatcctagtccagttgcctgtcaagtctctaatacggttcaaatccgtctgcagagggtagcacgtcatgatctctaagcgctcctggcagtgttatacagaagacatatctaatagttttgggttgggctcgacgggactcaccatataccaaatcttatacgaaatgtgttccggataatgaaggaaaagcaaagttctactcatacactacaaggactgcttagattgtatccatacttgtctcttagttctacttgaataagggaacattcgaggatataaatacaagatcccctaggaaaaggaggcacatgcaactcgctaacacgtctagacagatctagacacgccaacacaagacaagccaatacagatataaacaaactcaacgtaggacccacaaaggccgacatgaaggatccagcgctacctccaatctcgtcgagttcatattcgacaaagaagactacattagctctcgactatatgtgagagctctgtgccgccaaaccgacagagactagattaattaggccatcccaaatattgcacttatgacatattgatatataaaaacaacaccagcttcgaccaataggaatagggctattacatgttagttaaggggctcaaacctgtataaaagtcacagtcgcaattctcttttatcttaatctcgtgtatacccttattccaacgaccgtatatactctacaaataccgtctgtctgtgagtataacccgtcgaaagttcgaaacctccttcatccacgcacatctccattgtgcaacctctcgtcgggagcaggagtcgcccactcgcccttccttgtcaacttttatcgtaaaagttgattgggctgaactaatatttcgacttcatgcggcctaatgacgggatggaattacgtgccataataagttcacttgaggtccttcattttatcgctaaatcagaaccctgaacctaaatatcagatataacctatccatatcaattttgatctcttatcagcataatggccggttttaaattaatataataagtgagactcacatggacttcacatgcaagcgatcaactttttgcgtgaagtcatgaagtttcttggaaggatggtcatttgaccgttggtatatctatcccagtcaaagaagcatacggcttcgtcgtatcgcttattccccttcggggaataagttaaacatcatatttacaaataaaacataatttgtgaataaaatttttatatgcatattctcggttatctaaaaacaaatgctaaaaataaacttcgataaaaatcacaaaattaacttcaaatttatagttaaaaattaaattttaattgataagtataaacataagcgaaaaattaggcccatagcctcctacaggctacagcaacaaacacaccagtcacccttttgactatccgttgccacgcctcgcctgctctctctcagccacacgcccacacgtacgtaagcgcacacgccacgtatgcatcctccattcgcgctctgcctccggcgtacgttgcagggactgcttgcaggcagctacagcctcgccactcatctttaaacaattagctctgcacaggtcgaatccaattcgggaatcgcctctcctcctctgctttgcatcgattcgctcaatctcgtctcctttatatgtctgcatttgcaccgtctcttcctctccacgttgcagcagcagcaacagcagtagcttcacaagggaggagaggaaggattaagacgacgagcacttgttggaggaggagagcagctgtcccggtgaac

SEQ ID NO: 6789 - DNA, 2000 bp, Oryza sativa
aacaagttaagaaacaccaatgtgataaggaaaaaaaatatttgtattgtagcaatcaacagtatggcttggctgtggacgagtagtaacaagaagatgataaattcaatttacagggcaggtgtttacctgaggaaatttcggagcaatctttgttgcttcctcggcatcagcaagcgcaccagtgatattccccattgacaatctagccctagacctgcacttagcatcaagcattcatttcagttaacgcaaactctcattctcacttcccaatagtgcaacgaaggcagcatttcctaagagaaaaacataaattgtgaaaaattaagctatcacacatactcccaatcccaaacactcgttctcataatcaaagctacagaaaggacctgcttctgtacgccaagtggagaccgccaccagcattcatctcgatagcctgcagtgcatacaagcaagcaacaagttagaaattggaacaggaacactacatgatagtacctgtagcacgggagatgcagcttccttgacgccattttcaagagaaaagaaaaaacaaattggcaagcacactttgcttggtaagaatggggtgaatcctctgcagagacctcagtcaggagggcttccgcttcggcggcgccacccttctcgagggcggcctccgccttctcacgcgccgcgarcgcggcgagccccgccgccgcgtcgaatccggagtcgccgagcaggtgctccaggagctgcgcggcgcgcgcggcggtgcccacgtggccgaaaaacgcggagcagcagccggagacggaggcgccgaagtttgggsccgmcccgcagcggccgaggcaaccgcaggaggccamgtcgaagcgcggcggcgcgagcccctcgagcgccgccaggacctcgcgcccgccctggcgcgcgcacgtgcggttggtgcagacccgaatctccaccgccgcccccgaagctctcgccgtcgtgggactccggcggtggcgcggggaggcgaaggagcaggagaaggcggttgcagccgctgccgccatcgccgccgacgaactctgatgaggcggggggacacggaggtggagtaaagtaataatacgtttttttaaagggtttctttgcaaatttccgcggacattttccgggtccacgagccaaaccggatattctgatctcaataccgacccatgtttttggtgggccttacgaaagcctgtctctagcgagcccaactttagtgggcctaaatacggttagggaggatgtgcggcccatgaaggctcggcccattatactgcaactaggcccaatacctagccattcagagtttcggacctgtggctatcgcggaagggagcggcggcgaacccagctcggtgagtcgtcgtcggcggcggcggcgacggcgacggctaggaccacgtgacgcggatcagctcggaggcagcgacgacccatctctgatctccctcacgttcagaggcgcgaccaagcgtcgagggggagcgctcgacggcgaggtacgcgtgtgcagatccccttcaactctaggtcgcaacgaagcctcgacagtgttcccaaattttcttgatttttctgtcacctgctagtttgttgatctgcttgatttgtttgtcgcctgctagtatgttgcaactatcggtgctaatcgatttaggcgattcttgcacatctttctgtgttgactcgctggtgttagcctgttaggagtgatgctctctagctgttcgatgaaatgcctgataaaagcatctttccacgccaatatatctatacatttattcgcacgatttgttcccctttgctaatgtacctatcaccatcgatttgcatgcgataggatcattggatcattagattactggtgaatgtcgtataatgatttttaccatacaaagtattgaacaagaatgcaagtggcttaatggttcattgttctttctgatttctttttggtttgtagagtc

SEQ ID NO: 6790 - DNA, 1254 bp, Oryza sativa
aagttaaatttgagttgttttgttgctaggtataggtatgaatcgaatacttataactagatatatagaaaattttgaaaaatttagacgaatttgtgtatttcatattatggtgcccgggtgcccatatatgtcctatgtgtgtgtatgtaaaccggagttgctcaaagtatatatactataaaaagagtgtgctaaatatattcaattaaaaaagaaacacttatcatagaaatgataatttcataggatcaactccgacacaataattttctcatcaatttaagattccatggttcaatataattatgctttagattttatatatgttctgtgaggataattagaagaaaatcgcgaagtgagtatagctcaacttgttaggtttttttggtagaaccaacccacccggttttatgtcctagactttgatacgcgggtgtttgtgattacggctaactattgttgtagtagtagccaacgtacctgtctacatcgaggcacttgtggtcaatttgtaaatcccaacatatgtcgtctcagtctttcaaaggtgctcgtagaggtagggtagtgtgcgtgtgtgctcgtaggggtcattgtgcgcatattatgagcgtgtgcatttgtactgtttttcttaaaaaaatcataactcgttaataagatagcaggttcataatatatagaatgaaataatatgttttttttccaaaaaaggtcatccacgcacaaaaatgcatatgttaggctagcaaaattttaagaaactttaatataagatgtccactgtttgtgtgcgcatgcttccttcctgtttagttagattacaaatatatttagttcaagaattacaccaatatattcgtatatatattaaagtactggtttttgcagctgaaaagaatatatcttatgagatcgaattgaaacttttgttcaaacttcaatgaatcttaattaaacacgttttcagaaaaaaaaatagtatcgtcacacaaattcaacggagatatattattgttaggaaaattggaaaagggtacaacgttctggcagacaaacgtgcagctcacccctataaataacttagctgcgaccatttgttcgaatcagccgggctgagaggcagcagctagctagcgcacatgcattttcgttgtggcgaacaagctagctgctagtaccctcagttataccaagatatacactacattcctagctaggtacgattagccgccggtgagtggggag

SEQ ID NO: 6791 - DNA, 2000 bp, Oryza sativa
ggacctgatcattactgtattattacttcatggtttagtactaccactgttacttcattaatttctgttcaattttcgccatgcatgagctatacgtaccctacctactatacgtacgtatactgtgtcgtcaatggtatgcgcgtacgtatgcatctttctgttccaacaacagttttgcgccccttcacccattatttgaacagctagctaagatcgattaatccaaaaaaaaagaagtgaaacaatatattaacatatataatccatatattcttgtctcttcatctctctcctttaaatttcatcgttgtccctgccgctagcttccttcaccttgttggcaccggcgaggcttgacaagtatatatgtccaccatcgcgcgatctgtactcccaacgtcgtgcgactagcttcttcgtcggcaccggttatctatcactaccacggaagggattatcagatataatgtagtcgtcgatcggagaaacaatttgaatttggtgaaccattaccatcaatcaatgtgcttttgtcactagggaatcgtcgcatgatcgataaggtatttgaaccgccatgtatacgtagacgatattcttaattaagtataagtattctttcagtttttcgtaatgagaactatatataaatgaaaaatggcttgggaaaagtagaatcatctcgatctgatactccaaagttcttaataattaactagtggactacttctatagatgatagttacccaggaatgaaaaaattgaaaataaaaaattatgctatttggagacttggaaattaagttctcgatcacctggatatatctatcgttattacttaaattattttctgggttagaataattattcttcattttttttaagttctcatggtagaaacaacaggagaaatgtcttaggggtcttccggctagcttcacaaggtggtgggttagttgagctggatttgaagcctcaccccttctatttatttgatattagattattctctaatattcactttttaatgacagaacaacagaagacaaatgtacatgtatctatgttgaataacagaacaaagtgactaaaaaaacaggatacacaaaacctacaacactaatatggctctctaatataagtccacaatgtgtatactagaatatccttttttcttatgccaacatactctacaggaataacttctgctagcttgatatctagaagtccaagtgatttgctttttgtttaatgttgcgaattaccttgtcgatttgattaaacaagctagctagcgtacgtatatacgtacattacagtacacactatagctagctagtacgtagtcaattagctagctgcctgcgtacgtacttggcgtcaacctcagcagtcttgcgtttacgccagcatctgattatctgaacaggaacacgtgcacagtataccgtgcaagctacaaggcaaaatgcatccatcttgtactattacctggagtctgggcattactctctctcgctctccatctctctaatccccaattactctctctttcatgtgcatgcgtgctagtttgcataaaacaaaacgtgcatgcctccattaacaattaacatgaggagttaattacactactctcactctcccccacacacagtcacatcgacacatgagataatagactatattcatcaaatttcactcgatttgtacatttttattggttgcatggccacaattttatccatatatccattccactgtcacgactctattaagctactcgatccacatatctataaataccacctcccctaaccctagcttttcatcaagccataactttttagtcaaaaaaaaagtgatcattgatctaaactacttgcaggtgacgcacacgtacgtactcacacagctaagagctacagatagtactccagttcacttagctacatcaatcaaggaaaattaagcttagcaacaaccagctagcttcc

SEQ ID NO: 6792 - DNA, 2000 bp, Oryza sativa
tcctaggggagtattgtatttatatagatagacaacttattctttaattagaatttgaatacaggcaaataagacctaggacacaggcaaataagaccttgccttcataggatcgagctccgacgcaagcaaaattggcaatcgtcacaatgtgatttagatagaggaaaaccgttgggagaaattatatcgatgccatgatagctagttgtgtattgccgataggctagactatatatatgggactggtacggtatcttgaaagagctaggaaagagatgctagagagttgggtctctttgatttggccagtgatttgttggtacatgaggcaaaacccctggcaccagcctatttatggttatcaggttttggctagctacaacttaattaaaaatgtttatgtttatgtttagaaagaagggagtaactttgtttgatattataaatcgttttgaatttgatttttatgtttttttaagtttcatcaagcttaaaaaaatacaataacattttcatacaaaataaacatattatcgaaatatgcttaatgctatatttactaaaactaatttgatgttataggtgttgtgagatctttctataaacttcattaagaaacatttgaaaaaaaggatcaaaacggttctaatatgaatgaatgaatgaatagaggggtacggcatgtgctctgcatataccgttactacgcctcgtacgattctgaccgggtagctagggtagggtgattaattattggtgcaaattaaccattggctatgcaggcatggctagctgctgtaactaattctccatcgatcattcgatctgccagatcggtgtcctcctgaattaatctcaaatctggatgtaaaaaagataattaatcaattcccctttcatgttgtcgactgcatgtgagcgaatgaagttcagcagctagctaatgcagttcttctgacttgcaagtcacaggaaagcaaatgcctacagttgagaaaagcacaaagctgatatctacattacacaatgctacagtttaatggacggatgatttctgcattacagcattagtacgtcttaattgcaactgtcggtcaactgctccattgatcgatctctcgtgctgttcctgcatgtgcatgcatgtatgagtacgtacgtacagctagactggtagtttaatttgattgtataaactgacgattttagttaattactatctaagcgtctatttagtttgctgtcattttcaatcctatcaaaatttagtaatgctgaattttgaaatgacaataaactaaacacacacttcaactatgtaccttatcacaatttggcaaatttaaaagttctctctctcaaaactccacttaactttggtaaaagcatcaaaccaaacaaaataatactatcaaaagtattgttgatttgataacaaaatgaacaagctgctttaaatttattcctcaggttcttagtacactgtacacctggatctctcgatcgatcccatataccagtacactatagattgctctcgccttaattaattaatttctagatctcaagagggcaacagaccccctggcaaggacagatcgaaaaacatcgctcgcctaaccattcaattctcactgaaaaagcttaatatattaggagtagtaagctagcgtgtgaggaagattcataaccatatatcatcttaattagcctttgtgatttagcttaatcacatggctaaggcacaaccacccatccacttaactcttcattactacgctagctacacgaggagagtagctagctagtacaggccccggcaagcataaatagcagcgtcccctgcttcctttcttcatcgtcctcagctcatcatctgcatgcagttcactgcacaccacacagcttagcttgctcagcttcactgatcttcttagctgcagctacttcactttgcatagtttgatcgaactaaataactcaccaagttagctgta

SEQ ID NO: 6793 - DNA, 1125 bp, Oryza sativa
ccggggaggcaaaatagacttttgcggaggaatttgatttggaaggatttggattcggatttgaactcgacgatagatcggggattgagatcttgagatggcatggacactagacaacaagcaaagaaacaaatttcgcaattagggtttttaagagataattttcccgctatgcgccacgacggaacgggcgctacagatcacttctccagtagtgaaatatgacaaaactcaagggcgtgatggaaatgataggaaattcaaacgcataaaaatttgagcgaaaactgatgagaactaaaggaattttctcaatgacgaactttgaagatgatgaaggcgctattgccgtcaagattgaaccaaactaatcgtatggtctttttccaacaaaaaaatattatatatcttggtacacgtacgcgggcgcgcagcttcaacaagaatctatcatgaacgggtaaacagctgaaaccatatcatcttcctacattatatatcttcctatatatttatttatttttatccagagaccatacaaccatagtgtacggcacgctactatagtacacgctcctacagctgactggggcaacattgtctcgcctgtccagtggaccaaccgggtcacggtctcacgtgccaaagatgaaagaccagctagctagactgcgtccaagatgtactccgacatactcctatagtagtatgatatgtccaacatcgatcatatctctctttgccggtacgcgatcgatcgaacccgtgcatgcacgggtaacctgtgactgtctcgtgtctgggctggtgcgaccaactggttcaaaactccatcgcaccactgactcgtccaaaatgcaatcacctgcacgaacgaacgcacgcgcgatgcttccgatgatcgaagcagccagcaaaggcgagaccgcgagaccttctcatgttggaaacgatggcgtcctcgcgtataaattcatcgcccgtgcactgcagcgaactcacatcgagatcaacgatagagccaagcacaaacacgagctagacgacgctatcagcgaagcagaaacacacacacacacacacaaaatctcccggtgttttgtttagcacagtctagtgtttccc

SEQ ID NO: 6794 - DNA, 2000 bp, Oryza sativa
gtttataaggtaaacaattcaggctgacaatcacaaacactggagaatctacaatattttataaatttaaatgattgtattacacaggggaaattggaaggcgggagagaagttgctgtcaaaaggctcaacacaggttgcacacaagggatagagcattttacaaatgaagttgttcttattgacaaattgcagcacaaaaatctagttaggcttcttggctgctgtattcatggagatgaaaagcttcttatttttgaatatttacgcaacaaaagcttggattactttctttttggtacgcctaatcatatattcattttccctttatcacttttggtgggagaggtgcctgaacaactttaagtcttgtttcatactgttcatggtagatgattcaaaaaagcctatacttgattggcaaacaaggttcaacataatcaaaggagtagccagaggtcttgtttatctccaccaagattcaagaatgagagtaattcacagagatctcaaagccagcaatattttattggatgaggagatgagccccaaaatatcagattttggtatggcaaggatctttggtggcaaccagcatcaagcaaacactaaacatgtagtcgggacatagtgagtaactcttgcactacttatgattaaaatactaaattttatatacttggatactttcaaattacccacacttcttgttattggtggcacgattcaaacagtggttacatgtctcctgaatatgcaatggaaggcatcttctctgtcaagtctgacacatatagctttggtgttttagtcttggaacttataagtggttgtaagatcagctcaactcatcttataatggattttccaaaccttatagcctgtgtaagttctatgaaatattgagatgaacaaaatttcaacagctaggatttagcactgattaggatatctcctctctttgttcaggcatggagcttgtggaaagatggaaaggcagagaaatttgtggactcaattattctggagtgctattcgcttaatgagtttttgctctgtatccatgtaggactgttatgcgttcaggaagacccaaatgctagaccactcatgtcatcagttgtggccatgttcgagaatgaagccacaacacttcctacttctaagcaacctgcatattttgtgccaaggaatygcmtggcagaaggggcaagagaggatgccaacaagtctgtgaacagtacaagtcttaccacactacaaggacgttagatgtttaaatttcagatatagctggctgtagaattcaccacttgatcaattgtgcaagaacctaggaatatgattgctttgtgggtgtatggttcatcttcaatggtttacaaaaaaaaaaaaagggaaattcttccawaagcaatttcgctcaattattggtgagttggaagtttctgcactaggcgattaagaaaaaagagagtggagaattgaaaccactgtgctcaaaactaggtaagctaaaagagagcagtaaagactacgattacttgcctttccttcaaaaaaatatatatataacttgggataaaaatcataattggttttaatacctattgtacttcttcaaatggagagtggcagcatcaagggcctgtgacaccacgtggagccatggaacgcacgtgaggtttcgcttttgcctgcactagcctatcactccaaagtccatggcagcagcattctttcgttttcgtgcagcattgtcacacgacttggagtatcatgaccaggtgacctggtcatcagaattcagacagggtcctttactgtctctgtccatgagtctgaatcaggacttagccatctcacatttctcctgatcttcagatgaggtgacagcaagggaattgaactccaactacaccagtccatatctgcattatgaatgaaagatataacttgacccatgacaagcaaacgaagcagaaagtctaacaggcaat

SEQ ID NO: 6795 - DNA, 2000 bp, Oryza sativa
ccgttttcgaaaataggtccggaatccggaaagtttccataccgttttcacccctagtcggggcagtccaacccctcgggctagggaggggcagctaccacccatccacgggcctgaccccctcgggggaagcgccacgtggacgttgagggaggcttctcccctttaagcatggatacccccagacaccatatcaccgacaccacctataatagagaccattctgcattatattttgtgtttgtacacctaattatttatgtatcagttattgtgaaatttcttattatcaaatcaactgaaactttttatattttggacctacaacatcataaaaaagtacatatgtacctctaactttctgatggacctactataccataaaagagtacatatgtacatctaacctttctgatggacccactacaccataaaagagaacacatgtacctctaacctttctgatggacccactatcagcctctccctgcaccctctctttttcatctccccctactctttctctatctcctcactgatccccttctcattttctttgacgatgcctccacctctcccctcctccccgtccatcgtcgtatcgccctcttcttccaccgccagcctctccccctctctcctcctccgtcggtgccaacaccgtctctctttctttagccaatgagctttagctctctcccctcttcaccaactagctcgagctctctccctatctaatgatgagcttgcctctctcccttctcttgctgatgagctcgagtctctcccctctcagccaccaagaagagccccaacgatggtgaggatagcgaggtctttttcaccacaaaatctacctacgagttcactagatatgatcgcaagcttgcagaggtccagtgacgaggagtcgtgacgacctttgctccgattcctatctcttgtcatcccctccatgcatcctcaagttgttgatgacccttagtcttcttcactatccatatgcctatttgtctcccagaaccgccaccgctgaacaargcaaaatagcttagagccctctagccattgtgccatccacacccgtccaccctttgacttgcgcaacacaattcctaggccacacacatgacaattttggagtagcgcatatgacattcaattggagcattgtagactacagccgactagaaccatctcctttatcgcctgccagttacacatttttggtttcttcatgatatccaacagcgcatatgttcttaggctagtcagttagaccctcgggcttcattgttgggtgccaccactaccgactactctgctgaccatcgacgtctggaaaaggttctcggccaccgaaaaacgctattagtcgttgcttacccaagaacactcgtccttctgcaagaggctagcctactcttcgggctggagcgtacgtttgcaaatacgcccggactcgatcggagggtgggtagggtagggtgctagttcggagcacgtgcgccgcgcgcaacggttgccggaaagcacgtcagggtgggtgcttccttgattccttcgcgaggtggtactcgccgcactggccatcgcccaggtacgcggtccctcgatcgcgcgtcgatccaaggcaatgcaaacacgtgaggtatcatgtatcggcgactcgatgggcacaatatatatacctacctagccccagattaccagtagcgaggcatccaccaccatcagccaaagtgccaaacgatcgatcgatctctgcagtctgcagattagcccaccacctccagcatcgggtccacgaatgcacaccctgtcaactccactccacccgcttttctttccctctccccgccaccttcacatctcaacctttcctctccctctctctctctctctctgatctcgtcgttcccatggcctccaaacccgcggacgttacggctacaggtgagccatctatctacatacacacgtcctcgtagtaacgcgcc

SEQ ID NO: 6796 - DNA, 2000 bp, Oryza sativa
atcacaccgcatatactataaattaatgttaagtcacctcactggctaaaattatagttatttactatgtttagttttttttcccaactaagcacatggtcgggtgctacatctatcaggtgcattatttgatgagccctccacaacctctttgtaagatattaacatgacgactcaagaagtaagcactcaggaagccttcgcaaggaacattgaagcattaagtagtgatcatcaaccatggaggagactgcaactctactatgaaggtctcgggggttactgtgaagaatatggttaccgggtccccacatggcctacatattttattagagataggaggtaagccagatccatcttataatattatctcttattgggagcctgaacctatctaaatttttatgtcatatattcatccacttttaggttttatgcgttacctcttttattattgttgatttttagaatcgacgctatcttttttggtctaagctttttttggagctcggtggtcgcctccattctttgcgtgtgcctgctgcttccgtcttatactcgatcgtgttctataagctcattgatctagctcagtggtcgcctccattcttactgacaggtggcttacgtggcttactgataggtgggtcccacgctgactcagccgccacgtaggataaaagcgaggtcaaaatcacagacgcgactctcggtcgggcgcccgatcgggagggagttaaatcagacgctgacgtcagcgccacgcatacgtgcaaaaccactttaaactatttttttttcttaaattacttatccaaattatgatccgattgcaccattaaattcgttgcaattaaatcttcaaaacaagaccatacatggatatattccgacgaaaatattttttagcttattattgaattatttttaaatgttgcacgatgttccaccaagtatatcagaattatttcactaagtagatcgaaaatgtttcaatcgtttaaattggacgttgtttcaccttatataaaaataatgtttcagcaaatagcgaaaaaatgtttcaattgaatgcaacatttgatctataaatagtgaaacattatagtacactaggtgaaatattttcggtggaacaaaaaataaaacgaattcccttaatagagggtttccaaaatatgtgggtgatttgttgcaatagaatatttcagttcactgcaacattggatctatacatagtgaaacattatgagtacactaggtgaaacatttttggtggaacaaaaaaatgaaacgaattccctttccaaaatatgtgggtgatttgttgcaatagagtatatggtggagacatgtgacagatgagggcagggagtgtggttgggtccaggtggcatgcatgcgcgcgggggctgggggggcggggggagcgcccgatttttgctcctaccgcgccagtcgcccgagccctggcattatcccaaaatcaccgaaggacctatagtgaactgtttttwaagttgagggatgttatatatctgattttgcggttagaggacgattttgcaattcgatgacaagttgagggacctttggtgtactttttccttctttgcacgtgttagatctagcccacacttcatatcttcagcccagcccaatactcgctcacatcgctttccatttccagtcatccgtccgagtcgttgatgcagtcctctccgggggcattgcggtaaattccccactcgcaccggccgtcctgctcggttcacgactcgcctcaagtcaacggtcgtctccccgccccaatcagacccgccaggtcgtccaggtccaccacacatgtcgctatcagccctaatctgaaccgtccatccaccccacgaacgcatcgcgtccgtccatccgttccacgcggcaacccctcagagccattgttaaatagctagcgctaagctcggttccaccctacctctcacactggactagagacagca

SEQ ID NO: 6797 - DNA, 2000 bp, Oryza sativa
ggaacgacaccatgggacgcagacggcgatggcgtcggatgacgatcgccaccatgatcgtggcggctggatcaggccggaggagaagcaccggagctccggcgtggcgtgggcgctggtgatcctgtgcacgctgctggcggtcggcgtgatcgtcgccggcgcgacggtgttcgccgtgtacctcatctacaagccccggatgccgtacctggtggtgtccgacgcgcagctggtgcggctggactacgaccagggcggcaccatcgactacctggaggcgctcgtcaccgtcatggcgaggaacaccaactccagggcggacgcctccttcgcccgcgtcgacctcgcgctccgcttccacggcgccgacgtcgcgcgcctccgcgccgcgccgttcgtggtggcgagcgcctccgcggcgccgctccggtacgacgtcgtgtcgaaggggcgcgcgctggacgccggcgggatgcgcgccatggacgcgtcgctcaagtccggcgtcgtgccgctcgacctcctcggccgcgcgcgcacgcggtggaaggtcgggatcttcgcgtcgctcaagttctggacgcgcatctcctgccgcctccacttcttctaccccggcaatggcaccgtcatggcctccgatcgcaacacctgcacctccaggtcgccatagccgatcgccattgattccaattcctccatttgattcgttcgttgcatctcgacgccatccgagacacgtacattactattacatcgcaccattacagatcatgtttcacttgtcatacttgtacagccaaataatgctggtacagtagaatctcwgaatctacaagaagagtttattcaaatttagcgcgaaaacaaacacatttatatttgtaattctttattttttctcgatcagtcccctgtttgtactctgtaccaccaaattacgaagtcgatcctaattcctaaacagtgtgtatgaactacttcaagtgtcttttcgcttcgtgtcattgtcaggaatcagaatcgataacatcatcaactaatctcttcagtgttactactgcaaatccgatgaacattctctgacaaaatcagacgctgtctgtctactgaaaactgataatacttcaccattgggctgggcctgaattaccagattggactttctggcccaatatgtaaatccgatgaacattctctgacaaaaggaaaaagtacatcgaaggtccctccctgccgccgcgccaccgtgcggcccacgatgggccggcccgcacaaggagaaaagtgagaaagagagaggaagaagggacagaagaggggagagagatggtgatggcgtagtcaccctgccgtatgggttccacgctaactcagctaccacgtcggataaaatcagggtcaaaatcgtccaagtatccaaagtgacctggttttgtaagttgagggatggtatacaattttataatccgatgacaagatgagattggaccttatggcccaatatagaaggcccacctattcttgggccgaagtctaagcccaacaaccggtcagcgagtcgcgacggggagggagtggctgggaatcgccggagaagaggaggatgacgccgtgacacgggagcacagcaaggtcatcgtcgtcggcttccgtacgagactaggaggagaagtggggattggattgccgcggaattatctccgtcgctgtcgccaccggccgtggggaagcagcgcgcggcgcggcgcgggggggagagtctcctccgccaccgccagcgtgggcagtgggactacctccttgccccgctacgcgacgcggcgacgtcgccgtcggcgtcgtcacccctccgcacggtgcactgaacgtggcgcctccacttggcgcgcgacgcgacgcgacgcggcccgccttcttcttctctactgctacttaaccaccagccgcgcgcraagtgcggcgagcgcgcaatcgaggtcgaacacttggccggc

SEQ ID NO: 6798 - DNA, 2000 bp, Oryza sativa
gcggcacgttgccgggattgcccgtgcccgtgtctcgtctcgtcccaaagcttgacttagggccgttttgggtggctagcaaaacttagggccaatttggattgctaccctaccaaaatttgccctaccaaaattttggtagggtagcaaaccaaacacctctactaaaactctaccaatgccataaatttggctttgcctataaacttatctcttatgggcaaattttggcttcaatccaaataaatattttcaactctaccctaccaaaattttggtagttccaaaacttgcccaagatttggcactaccaaaattttggtaggacatcaatccaaacatgcccttagccctaccaatattttccaatattttggtagtttaaatagtatatgtgtttgtttgaattgagaccaatttattggcattatgctagatttgacatcaatctaaaacaatcttcactagaagtcacatgttagtttaatattggtagcaaaccaaattcaattttgccctaccaaaattggtagtaccaaaatttgcctaagctttggtattaccaaaaaattggcatggtagcaatccaaataggcccttaattatcgggacatttaagggttgttcggatgctagccaaaatttgtctcaatttaccacgagtatggtaagtaggtttgaccaagttagtactatagtgtatggttctagccacaagttagtaatatgtggcaaagaggctaagatgtggcttcatttttcttggccacaactttggcaacttagccacgaatgtttggctggtttaggtagtgatagacaaccaaccaaacaaccccttaatttttacactcttaaaatatgtcaattaattatttatcacttgctgcttgtgatatataggtccaataataaatcatttatcaccgacaaacaattaattattcctgaattatcccctcttttgcgtctctaccaggcgaaaggcggtagtgtactgcgtacagcctagatcaacggatattcaaaaggaatatacattcttataagattcaggaggaaatatttttttaagtaatgcaggggaaaaatagttgtgtcggtctaatggggactttgctccacaaggcaggcagctaatcatcgatcatcatcgctgtaacctgtaaggcgcatcctaatcaataatgccccccaaaaacgctacagctaccatcctctctgttcttttttttaatgttccaacaaatctttctccacccacaaaaggaagatatcaagaaaatgcaaagcgctattatagctgtaaacgcggctaaggaaaccaaaaaacaccccaaacaaaaaacaaaacaaaggtctagtttagttgggaaaatattttagtcggttatcacatcacattagatatattgacacatatttaaagtattaaacgtagtctaataaaaaataatatgcagattccacaagaaaactgcaaaatgaatttattaaacctaattaatctgtcattagtaaatgtttactataacactacgctatcaaatcatggtgcaattagccttaaaagatttgtcttgcaatttacatgtaatccgtgtaattgttttttcctacaatactccatgtatatattaaacattcgatgtgacagcatggaaatttttgttttaggaactaaatagggccaaaataaaagttcacaccaaaattgaaaatttgattgaaattggaatgatgtgatgaaaaatttgaaagtttgtgtgtgtagaaaagttttaatgtgatggaaaagttggaagtttgaaagaaaaactttggggagaaaacatttcaaagcgaaagcgaaatgaaactctctagagaagagaagccccagccgcagatattattcacgatccgttaagctgttccccctcccttccaacgccggccactcgtctcctcctcctcccacctcccgtttcccccgcgccatcctcctccgcctcgccgcc

SEQ ID NO: 6799 - DNA, 2000 bp, Oryza sativa
ataacttcttgtattttattaggagttgttgcccctagacaattttttctctactattcgtaaaatctgatcccgtccttgatacattgacatgagcactctcatcgccagtttcatcaattacagagagtccttaccatgctcgtgattgcatcgtcgtcaccaaaatggcttatccgcctacgtatgtacaaggtcgacactataaggacatgttttcatccgcctatgacatggccaccatctatctcggtgctagggttctagacattggtcctactccagaaccactgaaggcataggcggaaaaaaaaagacaatgtccgtgagcataacatccaaccaaccaaaaggaatgatgtcgtttagcggagcaattaaaacgagtcaaacaaaacagttatagaataaatattatatgacgtggaaccagatcatgtcgtatcccattttgagatctatacgcacgtcaacccttatcctaagaatgccctatcctacctttagaagccacctaaatactcatatgataacatatttacacgcgcgagtttcaattctcaccgtacaaggcattcgaaggagtaggatattatgattttgatttgtttagagacacaaatgcactccttttatcaaaagtgcaaaatagatagagttcaagtataatactctataagtttcgtaaaaaaaagattcccatacttttaatgtttttaatgctacaatcaaaagatagtaattcaaatcacaaattgctatgtcacaaacatagaacaattatccttttgagtcgggtttgtgctaccgctactgcactctcaattccatccttagtattatgatatatacacaacaacatattttgtaggccatatagaaaatcctcggtagctcctagctccgtcataaacttatataaagcagtatcatttagtataacacgaaatcatcataagataattttgaaaggaaggtaattatcacaagatgctacgctattaactcgtgtttctgaacttatttttcccatatatcataatcaaaatgagaaggaacacaagcattagtttttgttaccacgaaaagccccgaacgtgtacatcacttccttgttttaagagcacaacaagcatggtacgttcaaccactactacaagtctacaactaaagatactccccttgtttgaagcaactatttttgaccctcccctttcttttaaagctaaacaatttgttggtgttttgttttgaggcattgtaaaggaaaaggggaccaaacaaactgctgctactaatatgcgtactacacccatcaccataacaaacaagaaacaataaagtgccagaaaaagagagaaaagaagaaggaaaagaaaagagcaacaaacccagatggccgcacctgtcaattacttgtaaaaacgacacaacmtgctcccagttaatcagwttctttaatcgggtggtgtctatactaatcgtcccctctcyttcacactctttctctcgctggtctccgtcttcgtcttctcctcctccaccctctctctctctctctctctctctctctctcctcccctttgttccgccgcttcccctctctctctacctctcgcggcgaattcgccgagagggcgcagggaattttattaggagaaatcccctttttgtatccgtttctccggatccgcacacctcctgttaatccgccgattcttctttgatttgttcatattcgttttttttatttttttccctttgtttgcctttttattcgttcgattgtggggggagggaagagtttggtcgaccggatttcttggtggtttgcctggatctggcgtcctagaggccctcgtgcccgaatcccgattcgattcgcctcggcgcggcgccgctcgcctcgacgggtttggatctcggggtgggattagagggraaaggggggggggggcadttrwccttcgtttggttgagaccatcggagcagcaaggag

SEQ ID NO: 6800 - DNA, 2000 bp, Oryza sativa
tacatttggttttgttttgtatcttattaggggttgtctgtgattctgcccagccactttggtttggaagaaagaaattggtgactgaatcaatgaagctgctagtggcaacgttgcctgtatagaaggtttggtctatcttacttttggctatcaaattgtaccatgtgctcatatacctatgattgatttaagctgacatcaataaaagttacaccaataaatatcttcatataccaatattttccatagtatctattcatacaccatgtaatcaattcaatattccatcacctgaaattgagattaatgtgatagatttcttttaatgtttgagtaattgttgtgatagatatttttattgatgtttgctttttggcgtccgcggcaacgccgcgggatccctgctagttctagataaatccataggacgcaccgcttgaaagaaaaggtaaaggtcgaagtgctatcggtgcacgcacgggctggcatctagctaggcactcacgcatgctcaggccttgccagcggctaatcacagtatcacacgtgcaggagcaggcatacgaagaagaaaagagttaaaaaagaaagaaacacaaatagttttgtgaaattattaggagtatgatatcacgtacattgaatggaagcaagtatatcttactacatcgatatcacgtatgtctataaaatactcctaaaaaatagaaaaattaattgatagaaataatataaacgattcgatcaaacattataagcctcatattttttcttaaaatcattttccactaatactataaattttgtggatttatttgcaaaactttcaggttttataaattcgctgcaattttaagaataaaactattagattgttttttctccctaatcctcatgtattagaatataagcatttttagagttcgacacagttattaaggccgtgtttagttccacccacattcccaacttttcatcacatcacatcgaaaacttttctacacacataaactaccaattttttctccaaactaccaaatttctttcaacttcccaaacttctccaccacctaaacacaccctaagaaagttggtatgattaaatgggggagtattgtgattggagaagaagtgaaggtaggtagaaaaattaaatgagtgaagggttatgattggttgagaagagaatgttggtggagaagttgttatattttgggacaaattataaatgctataagttgttatatttttgggacggaggaagtagcatatataaaatcatttgtcagagtgaaacaacacatccaaattaatgacaaatataaattactaatctactttgatccatctcatcatttttaaagaaaatactaaaatccattaaaagatcattttggaaaattaaacttttattgaaaataaactaactcatgtaaaattataccgttttcctgttacatgtacaggatataaattaacagcgcgccttttggcgcgctgattttctagtcgaaaagttaaaccggggtataagtgtagcaccttcgctccactcaaagaaaatgtaagccgaagacttgagaagcttccagaatccagagatcgcagcagaaaaggagcgaacaaggcaaacctctcaaaggaaaaaagaaaaataataaaggaggaaacctgtcaaacaccaccctatgacaagtgggtcccactcgaaccaaccgtacggcccccccacccaaacccgctcccccctcgctccgaaaatatccacctctctagatctttctcgtcgcaaacgcccttccgcccccgcctcgccgcgcccattccaccacctttccgaaccttccactcccttccagactccacccccacgtcacccctatttaaacccctcctcccaccgagcaatcaagcgacaagatcgagaagccacaaaccccagcgcgatccgaggtagaagaagaagaagaagaagaagaagaagaggcgatcgagag

SEQ ID NO: 6801 - DNA, 2000 bp, Oryza sativa
tctacggctctacgcccggcgagaggtgggtaggaagtactgcatcccaaataagaaggaactaggagatgaccagaacaatgagggcgccgcggatatcactaacccaggaattgtttgcgacgccagaaccaattgtgcgtgaaccccggagacgcgagggcacgacgacgaggaggtcttgagccaaggaggccaccaggcgaccgtcgatccactggtcagtccagaagagagttgattcaccatctcttgacacgaagaatgtgacgcagcaaacatgtcggagacactccgctcaacgggggccttaaggccagcccagtagggatgcaatgagcactgaagccaaagccagcgaactcgcagggcgaacccactagttttaaaaaaactagataattttacttttctagctcttttggacagctatatgctcttttatctatctacattcaatttattgtacacacaaccatgtgagttcattgccaagtaaaaaccgaaatacttaagatcattcatatacttaagaaaatggcaaattttgctataggacacctaaaatttgtgtaatttgcttatagaaattgtaaaagcatgtcacgattgaaagccatcctaaaagactaataatttgctagaggacacttgcgactcaattgtaaagataaattcttaggaaaaaagataatgcccctaggacacatgcttcaaacatagtgatagagtgaagacttagaaattatgcaattctaaattagccatcaccccaaatagatcactagtatacatcgtattccatcttcactcaagccttagctcaaaagcttttcaccctagagtcattctcattcttttgaagaatttattgttccaattgagtcgaaattgtcctccagcaaattatcagttttagagatgtcttttagccgtgagatgtttttgcgatgtatatcagcaaattgtacaaattttgtgtgccttgtagcaaaatttgccttaaaaaaaagagtcagcgtgattcgatataataaaaataagagtagcgtgattcaagatataataaaaataagattacctggttcaaggtgtacttgtttttaaaaccacccgtcatttgatcgttgcttttaccagccgtagtcaaaatttaaatcttactactaaatttaattttaaggttttttatcatagtttttttggcattaacatttaaatcactaacaacacaatataaaagttctcctcttcatttattctttctctctttattataagagctatatagcaaattgtttcaacatatatttgtcgtgtgttttaggccccatcgtttaaccaaatatggataacacatttatgtgtgtattcttagcgatttaaataccaatgttgaaaaataaattttgataaaaaaaacttgaaaatcaaaattttagaatttaaattttaacaactaccgatattgtagagaaaaagagaagatcttatttcataaagggagactacgtaacggtattatcgtttcgacggaataactcacatcggcatgaatcctataggtattagatctaatacattcgataccaaacatgataccccgtacgtatcatatctgatatttaggtatcatactgacgtcaatatgatactatacgtatcagatctggtacctacaatgctagatatgaaccccataagaattagatctggcatctaaataccatgttcacgtcatcatgttaccatgatacctcgtgctattcggttgaaacagtataacattctacggtatttctgtattttagattgatatacaatcttttgtggtgttagcactagcagtcaaaggagtggccgaagtggggaccatcttcctccagattaaacctttttttttcccggactcgcaccggacttgccgtccgccgccattgcgcgtctccgcccaaacccaaatgttcgccgacggcgagcgacactgagaccgagtcgac

SEQ ID NO: 6802 - DNA, 2000 bp, Oryza sativa
ggaaaaacggaacaaccacccacacccacctccgtccatgacagtgggccccacctcgatccaactgggcgtcggcatattcgcagagcattttccatccacgttggtgcgccaactccgcaackcccccgagaccccacccccacctccgttacggagcccgccaatgcggtcccgacacgtgtcccctccccgctcccggagccccgcatcccacgcgccgctgctataagagggcccctcgccgcgcggccgcacgagttcgccgagccgagcccgagcactcgccgccgcttcaaccgccgctccccgcaacgackccccccccaccagcgaaggttcgtcgccgcgaggccctccccacccgcccccaaccctagcttcctcctctcctccccgtggatttgcgtttgcgtttcccgagacgtgacgcctctttctttcccccctgttttctactctcttttttttttggttttcagttcaattacgctgtctccgatctgaaattggcctccggagtacggagcattctgcgttttcggggttgtgatttcgtgtatgttcgcgcgcgctgctcatctaaatgattagatctgtggggacttatgttctttggatctgtgacgccctgggagtcgatttggggatttttccagtggtggaatttcaatttcagtgtccgatggatgattttggttcgggtagagaaattttgggttcgtaggtctgatgaatatgtgctgcgtgacatgcatatgcggtcaattctcgagttcttactcgcaaaaaaaaaatcgttagttcgcaaaccatataggaactaaatttacccaaaactcccaattaagtgatgcttgtgacattggtctaggtggataagtgggcgtctttttggattcggcaagagaggtggggtggtcgctttccagatctgacttaagatggttcctatatgttaattttctttgtgtcgttgtaaatagttgggagttttgggtaaatttggaataccgtcattccctaaatttgacagtcaactgactacagttacagaatcacttacaattttctcctttgatcaatgtagcaccctgatgtgtcagcagcagatagggaaatagcatcttatgtttcaccggtaccacagtttttggcatagttatcgtattgtgcaaactgtatactgttaagaagaaactgcttttgcaatttatttttccctgtatagaacttgattctattgttagctttatgctctgaaattcatattagatgttgtgttgttggtgtttattttggtgtactttttgtggaaattagtgattttggtgcaaatttgctggcttgatgatcaccttctctttaacaaatcatgttgtttctacttatgattacttgcttatcatcatgattcatgacattgcagcaaataatacctagaaatgagaaccattttgcttccaataaaacattatagcttggaactttcttccacttacaattatggttgatggcaatttgtgctgaaaacaataatcataacacacatagccataaggcaatatacatacgtagcctgatgttattctttattaattttcccttttaacattcttctgcacaaagctgcattttgtgaaactaactatattttttgttctacctgcagccatagacaagttggtctcatgaattcaggaagcacattggcatccagagtttcctgttcatcgggaaacaacggcatcttcccaccctgccttctcccaggattcctgggattcccagttgtgtttgtaaacttccacttgttcaaggccattgttcgcagccctgcatcttctgttgtgttgggaatctgtggagggcgccttccatagagaggtgccccataagtcttttgtttagttagtctgggaactggcatagctggaatttgtggtgcaaaacatccttggcatcagtagtctacactgctgaatctcaggttcctgaag

SEQ ID NO: 6803 - DNA, 2000 bp, Oryza sativa
atgggtgcaatttactctaaaaaaattactaagttgtcttttctccgcttccccaatttctaaccacttggtttccacacgcatacttatcaaattactaaatgatgcgttttgacaaaaaaaatcatataggaaagttgctttaaaaagcatattaataatattttttactgatatttaattaatcatgcgctaataattgagtagttttgtttcgcgtgaatggaggattagtccccaacctaaggcttgtttggcacaactccaactccaactccatctctgctggagctagagcttagccaaacagtttcagctccacctacaataggagcagagttgggtgaagctctctcacaaaatgaactagagaggtagagttgactttaggcagttccacaactctactccaaacccaactcctgtagctaaatttagaagttggagttctaacaaacaggctcctattttaccgaacacgacataatgtagggatggataacgagccagatcttctgactcgtgagttggattkagattattaagctcattaaactcgttaacgagctatatcttatatttagtaatttaaaatatactattttatcatatattaacataataattaacaactaataaaaagctcacttaaatacagatagttttgatgtaactactagttaagaaacaatgaatatacgagctagcttttgttaagtttatgagtaaaaaaaggttagcttgactcgacttatcaagattacgagttcaaaccaatccaaaccgagctcactgctggtcgatccgatccgagtcacgagcttcgattttttttcccacccttagatcagtgtaacacagaaagaaacaaatttcttcaacctttctggtcaacgcgtgctcagacttttttttgtgttcttctcttctgacttgtggacccaaatcttctgctcctttttacgtggccatctcgagagcgctcacttcgccacgacgtcaaccctctctcgtctctcttctcctagccgacgcgacgacgacgacgacgtcgtcggtgtcgcctccgcgcgcgcggcgcgctgctcccctgcacgccgccgccgacccacggagaggactccccacccatcccaggtacggcgcctcgccgcgttctcttctccaggttcgctttgcagaactccctaacaagaaccagatccaacccgaccaccggtaacttctccagctccccatttccgatatttttatggcttggattagctttaatttgtgtagtccgtggcgtgggtttaatcatgtctgtgtttgtggatgtcttacgttgatgggaatgggatgacctcatgtcactcatctccattcttttgtatttccctctttcatgttccctgattctgttttcgttgcgtgtcagtgagccgtgaccctgggaaacacgatgttcgttgctctgtcgctctcttgcctgattctccttggctgatttgtttgctagtgtatcggataaaggctgaagcttgcatttcaattagtacccactggcgatttctatattcttgatgccccgttcatgatcaccgattataatgtctttacttccacaccgcccaatttgctctgacgaatatatctttctgaccaaagcagatttccagtgccaatctttatgtacctcaagtcgcatcaattggtagactagagcaagttaggcagaattgctcttctttttcccccaaatgtacacagtgcatctttctttaatccattgtttgctgggtctyctkgttcctggaccttatctcctcatgttagtggctgtggttgttgctatcctgttggaagcttttctcatgtgtctccactgggtgtcatattctcggtacttaagcaactgagacggtgccattgcaaagcgtacctataaataagtccacactcttgcattgtctttgcagctccaagtcttgagggttcttgcattgggagagggggag

SEQ ID NO: 6804 - DNA, 2000 bp, Oryza sativa
gagatgatgtatttattagtggcccactttaagataccatgggttgtagagtgtagtttatattatgatgtcttattgagatgacatcatagacactacttatagacactataggttgggactgctcttaaagctgcgtttcttggagttttggtttagatttttagcagcacggggaactagaaggttattagtaccatattgttgtttgactattaattattattataaaattaaaaatggattatttagctaaattattttacaattctgtatcgatttttttctttacaaaatatactttgcgcagttcaagaagcttactaacacaaaatgagaaaatagcctagctagccaagaagtcgttttgggggtgtttgattttagccacactttatcataccacacttttggctaccgtagacatatgtttagttcaccaccacaaatgactcgccacacttttcaatagcatgttctttatgtcatagactcaactttcttatcaactttatacacttttatgactagcaatttattcaccacaattttatgtcagtcacaacttacaacttacgtaattgtggcaaaaaaatatggttggtagtcaaacgtacccttagaacgataagacaatcatcctaatataacgggaatataaactataaattgattgcttgtactatgagaaaccacaacaaaaaatacatatatgttacctttttaggcatgttaaatttgtagtccagaattaactttactaaaatattgacatttttttaagtactccacgtgttcgatttgtagcataatcaattttttgtagggcttttacgagagaaaacattggaaagtcccaaatcctgctaggatagcaatgataagtgtatttttggttcattactttactgaaaattgataatactataattaaattttggtaaagttgaaaatagcaaccaattgctatttacacatgtaattacatgctatttacattgcaattatactctaactatatcattgttacatttgaaatatttttgagggaaatttctatcggatgttggataggtagtagtcccattaaacaagcccattggatcttttaccgcattcccagatccacgaacccggaaggaagctatcccagatctagtattccgaaagcgaccaccgaatttgttttccctttaaaaccccccaatgaatttcctaatcccccttttcgctttatttattctcttccaaccaacaaaaatactcggcgaaatattttccgcggcgccgcgcgtaccgttcgtccgtcgtcggtggagtggaggctgccgaactgtaaagctcacgggttgggcgaatctccactcctcactcgccccccactgaaatcgccaaaaacccaactgaaaaacccccccaccggaatcctcacgcacacacctcgccgcggaagctgtggcgtccgcgtaggagcagctgtttcttttttggatccaatccaatcggtgagagcaattctctctctctctcttgcttgcttatagcgtcctggttaaaaggatgggggggttcttgatgttctttggcaagatccggtgaggccgctgctttgcttctgtgaggcattcgtggtggcattttctgtccgggctttgggttgatctgtttcgctggtgagaagcgcttttaactttgccttaggattttgctgggagagcttttcttctgcttgattctttgctgccagcagttaaatccaaatctttctttcttttgctgcgttatatagatagagtatatagtatgctggtaaatatggcagttcatgctcaaagttttccccattgtccactttggggtcagctactaggtctaaatcgccttggatttagctgaattgtttgtatagatttgcattgcattcaccctcatggttagtaaaaagagtgaaaagaaaaaaactgatttcttgactgtacaattcctcaggataagcagcc

SEQ ID NO: 6805 - DNA, 2000 bp, Oryza sativa
ctttcccttagttatatacacataaattttgtcactgtctaaaatgtcaagtgaaaaagaacgaatgtagcatcatccttgtcatgatctccaatcatccacgtagatcactgctcaccaaacgtccaaacctatcattgtgttattatgcgcttgaatgtacttgcatgtttccaagcaagttggatacgtgggcaactttgccaacttatctgtgttttgaaaataatttaatttacaaacaaaatgttttgaaaggtcaaaaaatgcaactagattcctaaaaaacaaataatattcaaatgaaacttaatacatagaacactaattcctaacaggaaaacgttaaaatcaaattgaagttgtgacatgaacaaatgaaaaagaaattgtaaataaacacaaaatcaatttagtcaaagcttgtaacgtaccatttggaatggaacttgcagtaagacagcaaattcaaaattggcagggccgaaataatcgattcttaattagattttgaattaactagctagcttggggaaatactagattcaactatgagagctactaatgttattaaagagaagatgaaatatatattattttacaaataaatagcgatagatgagaagtgcaggaaaatataaagtaaataaataagcacgtgaacatataaaaagatgagagaaaccccagaacccttttgtggctgattttacccctaaacgattggaaaaggttcgctttacaccttaatatcatttctcttattttactctttatacaagttgtattttaagttcaaattagttatagccataaacggtactgttatcaaagttgaaaaatggtactattaccagtaaagttttgtatttaaatcagtcttaagtgcttttaacctacgtaaacagtgagaaaaaaaatcaaaaataaaatgttgacacataagtatagagaaggaaaaatagtgtaagaggagtgaagagtgaaccattttcaatagttcgggagtgaaatgagaaaaagaatggtttagagggttaagtggtccagtgaaatagaagtaaggaaatggaatggacttttttttccaaaatataaagcaacttaacaagtaaatttatgtcatagaaaaattgtactgttctttttatattgcgcaaattttgggcatatcttttgtaaacctcgctgatttaaaaaaaaaaatcattataagtcgattgagaaatactttctccgtctcaaaatatataagtattttttagatggttacaagtagcaagaaagtaggtgaaaataattggagaaatattatgattggttgagaagataaagttggtgaagaaattgaatagagaacggttgtgattggtgagacttgagaggatgataagtacagaaatagttttattttgggacaaggcactgtaatagaaataactatattttataattgtgatggtagcaaagttaattttggatcaaatcaattttctctatgccactttatatttatgaacaagtggatcatgagcattgactttccaagatgtgaacaagactgcaataaataacaaacgaattgaaggatcgatcggcccggccgggtcgaaggtagttgccgtataagaatgccctatggcggcatggctcatccatccatcgactagtcattgtacgtagccacaccggtccaacctaagcgagagctaatggaagctctaactagctcgccaaattagctagtcaccatcactatatcttcctctatgtgtaatatgtacttgcaataactaataagaagatttgcctcctaatcagacaactaattagcttgatctgacagcgtgcattctgacgagtcgtacgtgcatcctgacacggcgtcgatcgttcgaatatataaacacagctgcgctctacgccaacaactaactgtccgtgtgcgagttgcgaccttgctggaaaacttgtacctagagctagctgaaggaagcaat

SEQ ID NO: 6806 - DNA, 2000 bp, Oryza sativa
agcaaaattaatcagggcaattagacaactgaaaagcgaagctaaggcgcgctaataattgaccccggactctctgatagtactacttaattaactaatcggagcaaggaaaatagcaaactatagtttagctacaaccacatgcgaagaagataggagaaaggagagagaaaatcgtactatagatttatattcagctatagtataagtataataaattaaaatgacactagatgatgtgtcaatttttagaagctacaagttaggtatagtattaagggtccgtttggtagagctctaactcgtaaatttaactctagaagttggatttagaatgcagttatgaagcagccaaaaattcaacttcacctctctaatttattttacgagaacactctacttagcttcagatcgctgaaactgtttggccaaacttgaagccgtaacaaaaagaccctaagtttaaactaatcctgcgctaatcttgtacgctaatccgtctctgggctgtgcatccagccagcgccgtgctttgctgtgctgtgcgagcagtgaagtgtggcggctttgtttaattgggtatcgcgtccctgtccggccaccgggtggtggttcgcgtccgggttggccgagctgcgagagcgacctctcctcctcctcttctcctcctcttcctcttcttcctcgtctcgtctagttctacatcgccttcctatcgcctccgctgcggaaaggctctccctttccgagctcttcccgagctctcctgcttgttcttggggccggggaagattcttgctgctctgaatcagaggtgggtgctgatacctgcttgctcttcttgttcttgttcgtcttaatccgagctcgtttggattgggagagagggctagcgttgtaggcggattgatttttgtttgggttgttgggtagtggcaagaacgtttgcttttggtgattttggcggctcgagctctgttgaaagttacttttttttttgggtacatggggtgtcgtgaaagtgaatgttaatatattgtttgtttgtctgtttgttcgtttgttcgtttgttagtttgttttcccgagttgaatttgaaattttggatgttattaatagtggtgttcttgccgttctgacggttgctgctgggcttgtagtctctgatttgtggctgcgaaattggatccaatcttttttttgggggaaaattggtgagttttgggatcaaattaggatcttgtgagaatataagcaggtgaactcttgcattcttgcccgcttcaatccccaaaactcgtgtttgctgctgtcctggtatttttgacaaagttctattctgacgtttgaattgtccattgcttggatttaaagcttggaatttttcttctttttttttctcgaataatattcagcttttaggtgctttgccggagaattcggacgcgattcttcccttggccaatcccattgagagatgccattcatgtttctgtcgatccatttctttttttgtttgttttctccagtaacctttctgcaatcacaacagctctactttttttctctatgtggatgtccttgtgaatttgctctgtaggtgagtagtgtctgccttgctggacattgatgtgattgatggagcatctgttgcctaatcattttagctcaatttgatctgagctggcgttcagtacattttgaaagtttatccgtacagagatttcggcgctgtacgttgcctgtttaatcacttctgtatacagctcatttggatccaattcctttagctgatgccatctggatccattgttatatcctaaacagtttgtgatccaactgtttcgttgctgtttgttatttctggttgatgaatttgaagtgtagatttatttggatggatcaagatttatttagagcagataatctcatttgtagtatgtttggttctttgctgcatattcaggtcaagtagtatatcatctgtgagttaaggagg

SEQ ID NO: 6807 - DNA, 2000 bp, Oryza sativa
cagcaagtgggtgagctcggcccggcccggcatgtaggttgggccaagcccagtcatgcctgagccgtgcgtggccaaacgacccgttttgccatctataatcatggatcatcttacttttgatatcagaaagtcatcaataatggtacacatttacccaaggcatatgtgcggtcacgggtcatcaggggcagagctagagtattgaggggtgcccaggaacccagtaaagaaaaaattgtagctatacctgacatattttcaccatgtgtgcatcccccacaatacaaatttagacacccgcattagcttaaatttgatataaatcagagtaaattaagcaagtggcaccctccctccatctcgctccagctccgatccgccttgagtcgtagttccgtaccagtgctttggagtgacatgcatgtcattgccacatgacttgccagcgttcgatcagtacgtagttgccggaacgtacgcatccatgcactgatgcacacaaactggagaaggctagctgtatcgtacctttgcaccactgtcactactagagaaacaattttttcatttatacggtcaaaaccgattttcacgagcacttggatggtctgtctgtacccaagtgtcttctaaaatcagtacttctacatgtgggtagaacaaagctgcatgcgaaacttcatgtgggtgcttaagccgtctgactgcaaaaaaaaattcccacaaaaaataatccaaaatcctagcagctcccgtgccggtggctgtcaccgctctcgtgctcagggtttgtcctcgctgtcgcaaatgccctcccccactcccatcgccgcctctgatccatgcgtatgggagggggagagcccatcggatccacctccactgagctccgcatcaccggatccactgctgatgtgcttcccatcggggctcgttggtggtgagctctggtttgatgtgttggatgtatactccaggcctcagctcattttgcacgtgagccagcttaagctagcttgttatttcgaacaagctaaaacaccagctcggcttgttagaaaaacgcaacgagccaagtcgagcctagtcgagttggtcacgagtcaagccaagtcaagttggtcacgagtcgagtgagctaacaagccacgagtttttccgtccacccctacccaccgttggatccaccgcggcagccgccgctccctactgccggatccgttgccgctgtgctccccaccactggatcccccatctccgagcaaccttttgtcagatcctccgccaccaagctcatgccccttcctgttcctgcctactgtcagatgaagtggtcatcggctgctcccgtccactgccggatccctccagcattgatcgcactcgcgtgccaccggcggagaggaggaggagaggagaggtggagagtaagtggaggatggagagaatgaggagagagaggggagacttgataatttaaggatgggcttgatcttgtgggccggtggcatatggacctcttactaagaagtcatcttaagagacctacaatgcaattcttgaaccgcgttcgggaaagtgatttttcaagtgagagcaattttggcttgcctacaccttaaaggggtcttgtctgagaattttgattttgtagtagtgtgctataagtacatgtgtctagctttttcgttccaaaataaataaacttagtatggatatatcacatcttaatttttttaaaaacggatgaagtagtctgtactctgtactctgtacacctacttctatcagctgatcagagtcgatcagagagacaacgcaaccaaaattccaacttgtcatccatgcatgcatcctccacgtagctagccctatactctaccttaaactctccactggataaatacccctacaagcctaagctgccatggccaaccccagagagatcagctagctagctagccagcactctgcacagcacacaacgaaacgcaaac

SEQ ID NO: 6808 - DNA, 1273 bp, Oryza sativa
  misc_feature (1)...(1273): n = A,T,C or G
ttgggggggraacyycttckgaaatwawaagggstmmccnattgtgagcaawgtgcagcgttgcttgagwtwaaaaawttggggggcaatatccggatacataaaacaactaattcatytaacarggatttttttcattggrgaaargggacgagtgaatcttttggkgttttttttttgaaaaaataaaagtctacaagaccgcgtataaagaacacatacaataaacatgtgctccaaccttgtaccgcctaagcagcgtaagcggtcgactataccatataagcgtccaattatgccgcctaaacgctacaaggtgggggtgacagcatgaaccgcataccgcttatcaaaacattgttcagtgtgctccaaccttataccacccaagcaacgtaagtggttgactattccatataagtgtccgattgtgccgcataagcgctaaaggtgggtgaccgtataaaattgtgtatcgcatttaaaatattattcaatatcttatcatcatgattgatcgacggtggaagacaaaatgttatttccttaagaacaattcggtgtcaaatctttccaaaaataataatgtaaggactaatgtgtactaaagaaaagtataaagttataaaataaaaaggacggtaaaaaaaatccataataacaacaatttgaaaacaatatcatttcatagttagcaaaaacaaatttaagctatgaatttccaaaaacaagttctagttacgtggcaaattattaatgccacatttccttttggaagccattcaacgtgctttatcaataaaaaatatagttacattgttcactagaatgcttagtaaaaaaaatagaggtttcatcaacccagttataacaattcttcaaatcaaaaggcacatttagctacaacatatgtcatccaattgtctatgctcccaatttttatccaacagagaaaaaaaaatcctcacatttatcaaaacgtgccaaaatgaaattcccatcttcctcaaggtgctaaacataaaaaaggatagaaaaagataaaccacctcattgacttccctcgcgtctatccaactcctcttcgtcttcctccctccccagtccccaccaccatttccacttataaaacccatctcccccaccccaaccccgttcccacctcacaatctcaccctcaactcaccacccaacccaactcaagcacctcctcctcctccaccggcaaacgcagcagcggcgcgcgcgctctcgcctccgtctccggcgaccc

SEQ ID NO: 6809 - DNA, 2000 bp, Oryza sativa
agtgatagtgaaccaaatatgttgttaaatatcaccgggttgatgcagaattggagtgacacagttaaatagataagtggagtgaaatagaaacctattagaaagtaaagaaacaagatagaaccattgtgttgcggtgtttcccggatcgatttaccttgcagaaacaatgtgacttgtgattgtttcaatcacgtaggggatcacaagttgcactagatgcattggttaacgtttgtcgtggcaatcgactaacaacttttgctgtgcaactgactgatatatattttttggtttcaccttattagttcccacttcctccgttcacaatgtaaatcattctaacatttttcatattcatattgatgttaatgaatctagatagatatatatgtctagatttattaacatcaatatgaatgtgggaaatgatagaatgacttacattgtgaaacggagggagtaccaagtaccaacatatggatgatgttttcagaatcgtatactgtaattatcatgtggtagttagtacctactactgagtttagaacaaaagaaatgcatgtggctgctcatcttacgctttgttaccgtcaattcatccatttgggaccactgaaaaattacacaagcaagatgcgagcggcacactggtttcaggttcagttacatcatcacacaaacatagctattgtccagttgctcatggcgagatgccgagatagtccacaacaaacaaactaacagattcttcaggcatatgccaccggccgcttgctttgctaatctttctagtttttacctgcgctgaaacctgttgctttgtcaatacagttttactttttaactgaaactcttcaagtttctgaaagccttgatgagacaaatcaggcgtggccctttacttcctcttgccgtttgctgtactccgagagagcgttgaaacgccggcctcatgggcatactccctccgtcccataagaaaccaatataatattagatgtgaggattataaatctggatatatctttatttaaatttattataataaaatatatcatattcagtaatagatttattttttacgagatgaaggaagtacgtgttgctgctgcctgcaaatctgccacgcgtgcgggggctggaccatgaactgcttcgaggccgtggaccatatggcgattgggcggccgacgcgaagaaaagaagagaagagaagtttgcctgccactggccggcggcggctcgaaccttcttccgtctcccacccgtgaggccgtgacgttgaccggcgatcgcgcctacacaccaaccaaccgggggccaactgaaaatacgcgtatcgtattggtcgctttggtttggtgtagacgttatactccacgtgatgcgccctgtatttgcactttcgccctcaattaatttccaatatactgagcctttcgcccttgctgcgcgcctgcgcatgcatcaagtcaagcacgtatttgtaataaacaggaaatggaaaggactggaatgttagtccatgtttttgcgaaaaagcccatagaaagcgattatttacttatgaccgacgaattcacacttcccatccccgggaaaaggccaagcaaacgcacacgcggaactgaaaagcgccgggcccgcatgtcagtgggatatactcctacctacgagaacattactgccaggtgggtcccatgtgcctgccccgctgaccacgtgctgacgtgccgccgtttggcagtagcctttccgtcgggctccaatttttwattttcagttttttctctatcgagatatcgacttttattttttattatttaatttttgttctgtatttatcatttattattattattctctctacgatctcgtcctcttctcttccccttccgttgggtttgattcttggcaatttggcattaatatttcatccacaacacaaggcgaagcctacgaattccaattcccacttgctccggtctcgtgcgtgc

SEQ ID NO: 6810 - DNA, 2000 bp, Oryza sativa
cgccgttacccaccgttacgaccaaaaacatacggaatggtgtggaggacacgataaagttcgacgatgacagagagggaggctcgaactttttagtggcacagaggcagacactatctttttaaatgcaaggaaaaacctcagagagagaggagagcgagacgggagagggacgcgggcagaggggaacagggaacggggaacgggaaggtgcgacgcggagagggagtggagaaaatttagatcattggtataggatagatgaatacatcattggtaagatgtaaaagtgtacggatgagagatgagtaaattgaaacggtgaattattatagggcagatgggcggataatcactcagttcaagtcctcctcaattccggatcgatcgggagatgacgacggcatttctcgaaagcggcaaagatggtggtcaagatgggcttagcacgctcccagacgacgtcattgtcggaggcctaggcctgcgggacgttgtcagagcgagcgtcctctcccggcggtagaggcgcgtccctcatctgctctcccataggcttgacatcgatgtcgcagacttcatgccgcatgaccatggcgactcctcctcgtcggacgacagacaccggatcatgtcggcgtatgctaacgcgacaaggtggttgttggctccaagcgcggagagagccatcaagagcgtgtccctcagcttcctcatcgcggagccttacctgctgcacgccgtcgcccgcgccgtcgacgacctcctccttgacggcagcaacagcagcctggagagccttgagatggacatgtggaccgatcgggtcgctgccggcgccgcgaccctcgaacagaggcgcctcttcggacaacgcttccagtcactcttcgacgcttacccggccccgattcaggtgcctcaccagcctcaccttgcaaaaccttcggcttcgaggaggacgcgattgctggtctcttcggcagctgcaacatgatgcagctactctcccttggccaatgtgacttcggcgcgacaagtaacgccaccctgcggatagacggtggggcccacgtggacccccaccatttttttattaatttgcatgtgaaattgatatggggtcccacggctttataatttttctggatcgaattgccacgtcaatgccacgttagatgaagaccgagtcaaattagctacgtagtcaccacgtcagtcaaaaccgctgtccaaatcagcgagggacctcatttgcactggtttttaatagttgagggacttgttgtatctagttgtatctggtttttccgttaaaggatgagaattagattcgttgacaagttattccttacacaaaaaagtcaaggcccaagcttaggaaaattcaggccaggctgggccgggccgacccaacaaatgttcacatggccgtcacggacagctacatatggaccagttccacggtccaccagcaaagaagcgttcatcccaacaaacccggggcctcatcaacagaacatgaagaagaggggtctacctatgacatgtggacccggtgtttacattgtgcccaccgtcattgacacaagtacacgacagaggaaaaacccaagactgcgggactgtttggatggaggctaactttgccatagctcgatttgccataactgtggcaagccacacaaagtgtggccacaactatgccaaactttggctagcaaataagagtatgacgtgtgggtcaatgtgctagtaaagtgtggcttgactcaactgcggcacgcaaccaaacactagcctaaaaaattgtggcacgtctaaaaattggtgtggcaaattgaggccaccaaccaaacagcccctgcataagagcaggcaactcaacgcggagagaagaagagaaagcaaagcaaccaccgtaccgcaaccgcaaccgcgagagccgagagagaagcctttttccccgatcgattcccttctctccgctccgcatcgcc

SEQ ID NO: 6811 - DNA, 2000 bp, Oryza sativa
ttaatacttaattaatcatgccactaatagtccatctggtttaacatatctttttaatcttcttctttccattcctcccaaactaacacaccctaagcctacaaaaggagaaaagaatccagtggagtatttcaattaggtcgtggcagcgataattgttccaaggaaatgcttcaatcagtgaccatatacaacagacgcaagcagtgggcaagtataaaaagctttgggaaatggaaacggaagcgtgtccacagaacaccactggctaatagcttgggtaggtacagggggaggaacaccactggctgccccctggggacacggggagaatgatgagcacggagcatgccttgtctcatgagcaccggagactggagcaaaagttgaccgggacatgcaatgtcttctgcccttacggcaggacgaccatcgtgtgtaggggcgcaggtttattataactactatgccatcccagtatgcactactatggcacacctctgttttctaaaagaacatctatgaacaatcattgtgcatttgtaccaaacatacgtctagtgactagtgagtagtgagtttacacgtagctctctattggaatgaaggaattctgaagtattctccgcagggttgaaatttgaaaggtcatttagcttttgtttttttctaaaaaaaaacaagaaataccattagcatatatttcattaagtattaactattacaacttaaaaaattagtttattttattttaaaggaactttatataaaaagatttttttcacaaaatgtatcgtttagcaatttgaaaattatattcacgataaatgagagagttacaaatgcgaaacgaggaaaataatgcaccctaagtcctgtgaaaatcctataaaatccctgcatttggtggatttgatttctcttgtaaaaacgttttagtagagtaaataacaaaaattccatgctttcaaatagagcatcaatatgcttcaaagcacattggttggatacgggcagtttgttatcttgttatactttagtgaatgcatttttgagacacaataattcttatctagatcttggatggagcaaggctgaccgttcggttgaagtctcgcgaggatccaactattcataccttttgtgttactcaatcatttccagtcaatcaaaacgccttgtcacctttttcttctcgcatgaagggcatcatgaaaatatttttaattagtatttgaaggactagatggccaggcatcgtatgaaaaatgagagaaccgaaccttgtttgaaggtgatggccatatcatctcagtggcatagccacatgctagcttaattaatcaaaatcattaagaatagacttcatatgttctttcaatctatcgctagatatgacgggaataactgaatcttgaccaagaggtgtcctaaaacgttgtagtacttgaattagcagtggcatacttgatagatatgaacgttattgtgatgttaaaactctttttgatcaagatagagctcacactatagtttgacatgctagcaacgagaagctagtgccgacttaaaccgaattcaaaatgttgcacccaaataaacttcaataagcttcaaacaggaccactctcaaatgtcatgctggaatctcatctgtgtaaatgggcatgatctaggggactgatctgacttaatctgttcaaatttcaacgcatgacgggttctcttttaaaataatgtgctatacagggctagttaaatgggacaaaaattaaccaaacgaaatatgcgtagtacatgtacaacctcaacttcccaagtggtggtgtgcacttgagtgcaaccaactggggccaagtcttttgttgtagtggaatatatatatctctccattgtgtgtcaccactatacaacaagcagcaacacgctacaaccatccaagcagcaggagaaaagatacaaacatagatcagaacctgaagagaagacaccaagaagca

SEQ ID NO: 6812 - DNA, 2000 bp, Oryza sativa
gaggagctactagaacagtttaattaatttgagtttggaccgcacatatatatcaaagaaaaccagaagatcagtctgttatagttgtgatgatgagtttctctaaactagtttgaagggagagcacatgcatgcatgcgtactggacaggtgtttggaaactgaaaaatggtatggcaagctagctagctagctgttttttcttttatttcgtgtgaagtactatatactagcatatatatattggaggccaataatgtttttctttgcttggattttttcgtggaatatgtccaatatattatctaaagaaaatgttcaatatattatccggtcatgcatgtttccctccgttttatcttgtcttttctgcttcaccatgttcctctagcagttgctagctagctagctcgatccatccagctggctggtgacgatgtaagagctgaggtcgccatgaactaacggtgtttaatggtcgatcagctcgagcttgttcgatcgatcatcgatgatgatgcatgctatataatgtttagctatatacatacatataatccaaccagttcattcagttaattgcataccgaccgatatgatatatatgctgatatatagagttcatttcgggggcagccagctagctgtgggcgggcggagtggagtggtggcaatctatatatcgagttgagctagctagcttaagctaggtgaggtcgcagtgtagcagggcagtggggtgtaccgtgtacgtagtacgtactggtgcatgctggccggccgggatcgatctatttattcatccaacacgtacacgtactgcttatctagtgcatgcgcaccatgccatattgcatgccatcgctacgactattcccaaacacgtatttactccgccccatgtgatctttgcgtccgtacgccccgacgcgtaccgtgcatgcatgttaaccacaaatatgctattgggcacacgcatgcatgcaagaaacacaagcagcgcacattctattcattttatcagattaactggctcttgtttttatccaccccatcatatactcccctccgttttaaaatgtttgatattgttgactttttagcacatgtttaactgttcgtcttattttaaaaaaataaaaaatatgtaaaactacatgtgtacatgaaagtatatttaataatgaatcaaataatatgaaaagaataaataattatttaaatttttttaataagacgaatggtcaaacacgtattaaaaggtcaacggtgtcaaaaacattttgagggagtatatcacatcgtcttcgatctcccaagccgcacgactcactgcaccgctgcgcctccttcctggctcctctcccaggccataccaccacctgcatgtagatcgagctctcctcttctctcggcaaaatgccagcgaaactcctcatatctaattcactaccagagaaaataacttcggtgttagatagtaatccctcatcagtaccagaaatcaaaccgacactaaactgtagttagattcgaatcaaaagtttttgggattgtgaaagctggcgtgtatgcacactagtaccaaaatctgactcattgccgaatcagatagtgaaacgcaattgcagtgcaggtagcagaaacccgagacggagatgtatacgtggccgtgggttgtgcatgtgcgccaccttccccctcctgacgcaccactccacttacgccctgaaaagaaaaaaaaaaggaaaggaaacagaaaatgccgtcacggcctcgcctaaactgagctgggcctcgatggatcgatcgactaggccgaaatcacggtggcccagtccaaggtaataactaatagcccatcaacaaacggcccaaaacaataataatatcccaactcccaccctgaaatgtcgcgtcgcgtgccacctctacctttttctctcctctcgtgaactcgtgttcggtgttcgtcttcctcccgcaccgsaccttaagcc

SEQ ID NO: 6813 - DNA, 2000 bp, Oryza sativa
tggtgtaccgtcacaagttcttgaaatgttaaccacgatgttttttgtggaaacaaaatttgtaatctctctatcgtaggaactgaacatggccgtagctgactatgtttttgacctttttcagcatcagtctgacagtctcataagatggattcctagtttcctaagttgctggaaagaatctttgtttgcttgccttgcttggctacatggtgttgttgcctgcatgtgttctactgcccccacgcttctctctttagggcccttgatgcttcgatgcccaaggaaggaacaatcaccacataacctcacaaaactccttttcagttattagttttttttttggtgtgtgtgtaagagtaactaaccatttttagtttttgttataaatattttgatgttttctgctgaaagaactataaagaagatggtagtacaaaatggacttgaatgactcatggttcaaatttgttcaggtaacagctggtctgaattttggatggaagagagccagattttctgtctggatgaatgaactgcaaccgtttgcaccgacaaacaattcgggctttcttctttgcaagatcaccgggatcatggcctgatcggtagcaaatatagatatcaagcaagaacactccgttggcacgctgccttctgaaggagcaaaagcagtcggtgtgtgctgtgaagacacttttttctcatgtgccggtactgatggtcagtataactcacatctcttgtttactttctcactttactcctagcatctttgatcacgatcagtatgatctgatcatcaccttggatcttcagccccattaaaaagcaatcatcggttgtcgatgatcgatcccactattgggttatttggatattacaatcgcattcaatatgaaagaacgaaagaaagatagagagaaaaggggcactgatcagaagaagaaagaagcaaatctgttgcaaaaaaatgtgttctggtgatgcctgagagttgagatgagagctcaactaccagaaaacgactgacactaactaaaggcaagctgatatatgtgctccatggaattcttcactcaaaagaagacagccaggtgaccaaaaacagcctgcctcagctttgtcaacaattgtcataacgcaccgacatgattagctctgattcccaatctattgacaagaattttgtgtggttaaaacaggtaacaacacagcacacactcttaactaactttgtgatcatccatcactttccttgtagtaatttattcagtactaacatctagttgcctttcagatcagcaaccacctggagatattcagatcattaaccaagaaacaatgcaattgtaggacaccaaatgcagactgctaattgctcactaactaaagcttcagaatgrgatcaatgaaatgataagcctaatttaagtgcaaggggaaaaaaaaaaggcaaaggcaagcaaagcaaagcaaggcttcatctccaccaagtagagacagtgtcagaccgcacatattccattcctcgcagccaagcaatctcgtcagaaaacaatcatttgggcagaattaattttgatctcaaccagccatgtggctggtcaggtgacggcgacgacgacaacaacggcgactagcggatcaccatgagaagtttctatctgccatgctcccatggaaagagaggagctactaaagaatcatcaaaagagatagaagggtacataaagaggccagtcagagttcagatgaatctgattctgcagccatcagaaaagcaaggcagaattccagctacaaattgggccccattctgaagagtttcatatcatatcatctcctacttagaacttgcacttcagaggaattttgcacgagcaaaatatttagccatatatatatattagtaggaagggaagctagctagtgtggtgtgtgtgtccttactgcaacctgcttcactgaagctcagtgatctttgagaagttccatcc
